(19) United States
(12) Patent Application Publication
(10) Pub. No.: US 2023/0121433 A1
(43) Pub. Date: Apr. 20, 2023

(54) CHIMERIC STIMULATORY RECEPTORS AND METHODS OF USE IN T CELL ACTIVATION AND DIFFERENTIATION

(71) Applicant: Poseida Therapeutics, Inc., San Diego, CA (US)

(72) Inventors: Devon SHEDLOCK, San Diego, CA (US); Sumiti JAIN, San Diego, CA (US)

(21) Appl. No.: 17/906,034

(22) PCT Filed: Mar. 11, 2021
(86) PCT No.: PCT/US2021/021957

§ 371 Date: Sep. 9, 2022

Related U.S. Application Data
(60) Provisional application No. 62/988,352, filed on Mar. 11, 2020.

(51) Int. Cl. A61K 35/17; C07K 14/725; C07K 14/715

(52) U.S. Cl. CPC A61K 35/17; C07K 14/7051; C07K 14/7155; C07K 14/7151; C07K 2319/03; C07K 2319/33

(57) ABSTRACT

Disclosed are chimeric stimulatory receptors (CSRs), cell compositions comprising CSRs, methods of making and methods of using same for the treatment of a disease or disorder in a subject.

### CROSS-REFERENCE TO RELATED APPLICATIONS

[0001] This application claims priority to, and the benefit of, U.S. Provisional Application No. 62/988,352, filed Mar. 11, 2020. The contents of this application are incorporated herein by reference in their entirety.

### FIELD OF THE DISCLOSURE

[0002] The disclosure is directed to molecular biology, and more, specifically, to chimeric receptors, T cell compositions (e.g., engineered regulatory T cells, effector T cells and helper T cells), methods of making and methods of using the same.

### INCORPORATION-BY-REFERENCE OF SEQUENCE LISTING

[0003] The contents of the file named “POTH-060 001WO SequenceListing ST25.txt”, which was created on Mar. 11, 2021, and is 709 KB in size are hereby incorporated by reference in their entirety.

### BACKGROUND OF THE INVENTION

[0004] Regulatory T cells (Tregs) act as negative regulators of the cytotoxicity and proliferation of conventional T cells, are key modulators of inflammation, systemically or in tissues to maintain homeostasis, and are important for peripheral tolerance. A lack of Treg activity can result in autoimmune conditions or accelerate allograft organ or hematopoietic stem cell transplant rejection. In autoimmune disorders, the suppressive function of Tregs is impaired or insufficient and the inability to modulate inflammation contributes to the disease state. A challenge in the field has been generating sufficient ex vivo expansion of Tregs that are free from effector T cell contamination. Current strategies for improving ex vivo expansion of Tregs cause a change of Treg functional properties and cause a differentiation of Tregs to other T cell types due to overstimulus. Contamination of Treg cells with other T cell types may exacerbate inflammation if administered to a recipient. Accordingly, there exists a long-felt and unmet need in the art for improved methods of ex vivo expansion of Tregs.

[0005] Effector T cells (Teffs) describes a group of cells that includes several T cell types that actively respond to a stimulus. A challenge in the field has been rapidly generating sufficient ex vivo expansion of Teffs that are free from contamination by other T cell types. Contamination of Teffs with other T cell types may reduce the effector function of the Tcells, if administered to a recipient. Accordingly, there exists a long-felt and unmet need in the art for improved methods of ex vivo expansion of Teffs.

[0006] The disclosure provides autologous and allogeneic T cell compositions, methods of making and methods of using these compositions, which comprise non-naturally occurring structural improvements to improve ex vivo expansion of Tregs and Teffs.

### SUMMARY OF THE INVENTION

[0007] The present disclosure provides a non-naturally occurring chimeric stimulatory receptor (CSR) comprising: (a) an ectodomain comprising a activation component, wherein the activation component is isolated or derived from a first protein; (b) a transmembrane domain; and (c) at least one intracellular domain, wherein the intracellular domain is isolated or derived from a second protein; and wherein the second protein is Tumor Necrosis Factor Receptor 2 (TNFR2).

[0008] In some embodiments, the activation component comprises an Interleukin-2 Receptor subunit Beta (IL2RB) extracellular domain, an Interleukin-2 Receptor subunit Gamma (IL2RG) extracellular domain or a CD2 extracellular domain. In some embodiments, the activation component comprises a modification. In some embodiments, the modification comprises a mutation or a truncation of the amino acid sequence of the activation component of the first protein when compared to a wild type sequence of the activation component of the first protein. In some embodiments, the mutation or a truncation of the amino acid sequence of the activation component comprises a mutation or truncation of a CD2 extracellular domain or a portion thereof to which an agonist binds. In some embodiments, the CSR comprising a mutation or truncation of a CD2 extracellular domain or a portion thereof to which an agonist binds does not bind CD58. In some embodiments, CD2 extracellular domain comprising the mutation or truncation comprises an amino acid sequence of SEQ ID NO: 4.

[0009] In some embodiments, the intracellular domain further a CD3 protein. In some embodiments, the CD3ζ intracellular domain comprises the amino acid sequence of SEQ ID NO: 5.

[0010] In some embodiments, the TNFR2 intracellular domain comprises the amino acid sequence of SEQ ID NO: 6.

[0011] In some embodiments, the ectodomain further comprises a signal peptide. In some embodiments, the signal peptide is derived from a third protein. In some embodiments, the first protein and the third protein are identical.

[0012] In some embodiments, the signal peptide comprises a CD2 signal peptide, an IL2RB signal peptide, an IL2RG signal peptide or a CD8 signal peptide. In some embodiments, the CD2 signal peptide comprises an amino acid sequence of SEQ ID NO: 9. In some embodiments, the CD8 signal peptide comprises an amino acid sequence of SEQ ID NO: 12.

[0013] In some embodiments, the transmembrane domain is isolated or derived from a fourth protein. In some embodiments, the first protein and the fourth protein are identical.

[0014] In some embodiments, the transmembrane domain comprises a TNFR2 transmembrane domain, CD2 transmembrane domain, an IL2RB transmembrane domain or an IL2RG transmembrane domain.

[0015] In some embodiments, the TNFR2 transmembrane domain comprises an amino acid sequence of SEQ ID NO: 13. In some embodiments, the CD2 transmembrane domain comprises an amino acid sequence of SEQ ID NO: 14.

[0016] In some embodiments, the CSR of the disclosure comprises an amino acid sequence at least 95% identical to any one of SEQ ID NO: 17, 18, 37 or 38. In some embodiments, the CSR of the disclosure comprises an amino acid sequence at least 99% identical to any one of SEQ ID NO: 17, 18, 37 or 38. In some embodiments, the CSR of the disclosure comprises an amino acid sequence of any one of SEQ ID NO: 17, 18, 37 or 38.

[0017] The present disclosure also provides a non-naturally occurring chimeric stimulatory receptor (CSR) comprising: (a) an ectodomain comprising a signal peptide and an activation component, wherein the signal peptide comprises a CD2 signal peptide or a portion thereof or comprises a CD8 signal peptide or a portion thereof; and wherein the activation component comprises a CD2 extracellular domain or a portion thereof and wherein the CD2 extracellular domain or a portion thereof comprises a mutation or truncation when compared to a wild type sequence of CD2; (b) a transmembrane domain, wherein the transmembrane domain comprises a TNFR2 transmembrane domain or a portion thereof or comprises a CD2 transmembrane domain or portion thereof; and (c) an intracellular domain, wherein the intracellular domain comprises a TNFR2 intracellular domain or a portion thereof and a CD3ζ protein or a portion thereof.

[0018] The present disclosure also provides a nucleic acid sequence encoding the CSR. The present disclosure also provides cell comprising the CSR. The present disclosure also provides a cell comprising the nucleic encoding the CSR.

[0019] In some embodiments, the cell is an allogeneic cell. In some embodiments, the cell is an autologous cell. In some embodiments, the cell is a T-lymphocyte (T cell). In some embodiments, the T cell is a regulatory T cell. In some embodiments, the CSR is transiently expressed in the modified T cell. In some embodiments, the CSR is stably expressed in the modified T cell.

[0020] The present disclosure also provides a composition comprising a population of modified T cells, wherein a plurality of the modified T cells of the population comprise the CSR.

[0021] The present disclosure also provides a composition for use in the treatment of a disease or disorder. The present disclosure also provides a method of treating a disease or disorder comprising administering to a subject in need thereof a therapeutically-effective amount of the composition.

[0022] The present disclosure also provides a method of producing a population of modified T cells comprising introducing into a plurality of primary human T cells a composition comprising the CSR or a sequence encoding the same to produce a plurality of modified T cells under conditions that stably express the CSR within the plurality of modified T cells.

[0023] The present disclosure also provides a method of producing a population of modified T cells comprising introducing into a plurality of primary human T cells a composition comprising the CSR or a sequence encoding the same to produce a plurality of modified T cells under conditions that transiently express the CSR within the plurality of modified T cells.

[0024] The present disclosure also provides method of expanding modified Treg cells within the population of modified T cells produced by the methods of the disclosure comprising culturing the modified T cells with an activator composition under conditions to expand a plurality of activated modified Treg cells, wherein expansion of the plurality of modified Treg cells is at least 5% higher than the expansion of a plurality of Treg cells not stably expressing the CSR under the same conditions. In some embodiments, the expansion of the plurality of modified T cells is at least 10% higher than the expansion of a plurality of wild-type T cells not stably expressing the CSR under the same conditions.

[0025] The present disclosure also provides a composition comprising a population of modified T cells expanded by the methods of the disclosure. In some embodiments, the composition is for use in treatment of a disease or disorder.

[0026] The present disclosure provides a non-naturally occurring chimeric stimulatory receptor (CSR) comprising: (a) an ectodomain comprising a activation component, wherein the activation component is isolated or derived from a first protein; (b) a transmembrane domain; and (c) at least one intracellular domain, wherein the intracellular domain is isolated or derived from a second protein; wherein the first protein and the second protein are not identical.

[0027] The activation component comprises an Interleukin-2 Receptor subunit Beta (IL2RB) extracellular domain or a portion thereof, an Interleukin-2 Receptor subunit Gamma (IL2RG) extracellular domain or a portion thereof or a CD2 extracellular domain or a portion thereof. In some embodiments, the activation component can comprise a CD2 extracellular domain or a portion thereof to which an agonist binds.

[0028] In some embodiments, the IL2RB extracellular domain or a portion thereof comprises the amino acid sequence at least 80%, at least 90%, at least 95%, at least 99% or 100% identical to SEQ ID NO: 2. In a preferred embodiment, the IL2RB extracellular domain or a portion thereof comprises the amino acid sequence of SEQ ID NO: 2. In some embodiments, the IL2RG extracellular domain or a portion thereof comprises the IL2RG extracellular domain comprises the amino acid sequence at least 80%, at least 90%, at least 95%, at least 99% or 100% identical to SEQ ID NO: 3. In a preferred embodiment, the IL2RG extracellular domain or a portion thereof comprises the amino acid sequence of SEQ ID NO: 3. In some embodiments, the CD2 extracellular domain or a portion thereof comprises the amino acid sequence at least 80%, at least 90%, at least 95%, at least 99% or 100% identical to SEQ ID NO: 1. In a preferred embodiment, the CD2 extracellular domain or a portion thereof comprises the amino acid sequence of SEQ ID NO: 1.

[0029] The present disclosure also provides a non-naturally occurring chimeric stimulatory receptor (CSR) wherein the ectodomain comprises a modification. In some embodiments, the modification comprises a mutation or a truncation of the amino acid sequence of the activation component of the first protein when compared to a wild type sequence of the activation component of the first protein. In some embodiments, the mutation or a truncation of the amino acid sequence of the activation component comprises a mutation or truncation of a CD2 extracellular domain or a portion thereof to which an agonist binds. In some embodiments, the CSR comprising a mutation or truncation of a CD2 extracellular domain or a portion thereof to which an agonist binds does not bind CD58. In some embodiments, the CD2 extracellular domain comprising the mutation or truncation comprises an amino acid sequence at least 80%, at least 90%, at least 95%, at least 99% or 100% identical to SEQ ID NO: 4. In a preferred embodiment, the CD2 extracellular domain comprising the mutation or truncation comprises an amino acid sequence of SEQ ID NO: 4.

[0030] In some embodiments, the intracellular domain comprises a Tumor Necrosis Factor Receptor 2 (TNFR2) intracellular domain or a portion thereof, an IL2RB intracellular domain or a portion thereof, an IL2RG intracellular domain portion thereof, a CD3ζ protein or a portion thereof, or a combination thereof.

[0031] In some embodiments, the TNFR2 intracellular domain or portion thereof comprises an amino acid sequence at least 80%, at least 90%, at least 95%, at least 99% or 100% identical to SEQ ID NO: 6. In a preferred embodiment, the TNFR2 intracellular domain or a portion thereof comprises an amino acid sequence of SEQ ID NO: 6. In some embodiments, the IL2RB intracellular domain or portion thereof comprises an amino acid sequence at least 80%, at least 90%, at least 95%, at least 99% or 100% identical to SEQ ID NO: 2. In a preferred embodiment, the IL2RB intracellular domain or a portion thereof comprises an amino acid sequence of SEQ ID NO: 2. In some embodiments, the IL2RG intracellular domain or portion thereof comprises an amino acid sequence at least 80%, at least 90%, at least 95%, at least 99% or 100% identical to SEQ ID NO: 3. In a preferred embodiment, the IL2RG intracellular domain or a portion thereof comprises an amino acid sequence of SEQ ID NO: 3. In some embodiments, the CD3ζ intracellular domain or portion thereof comprises an amino acid sequence at least 80%, at least 90%, at least 95%, at least 99% or 100% identical to SEQ ID NO: 5. In a preferred embodiment, the CD3λ intracellular domain or a portion thereof comprises an amino acid sequence of SEQ ID NO: 5.

[0032] In some embodiments, the ectodomain further comprises a signal peptide. In some embodiments, the signal peptide is derived from a third protein. In some embodiments, the first protein and the third protein are identical. In some embodiments, the transmembrane domain is isolated or derived from a fourth protein. In some embodiments, the first protein and the fourth protein are identical.

[0033] In some embodiments, the signal peptide comprises a CD2 signal peptide or a portion thereof, an IL2RB signal peptide or a portion thereof, an IL2RG signal peptide or a portion thereof or a CD8 signal peptide or a portion thereof.

[0034] In some embodiments, the CD2 signal peptide or a portion thereof comprises an amino acid sequence at least 80%, at least 90%, at least 95%, at least 99% or 100% identical to SEQ ID NO: 9. In a preferred embodiment, the CD2 signal peptide or a portion thereof comprises and amino acid sequence of SEQ ID NO: 9. In some embodiments, the IL2RB signal peptide or a portion thereof comprises an amino acid sequence at least 80%, at least 90%, at least 95%, at least 99% or 100% identical to SEQ ID NO: 10. In a preferred embodiment, the IL2RB signal peptide or a portion thereof comprises and amino acid sequence of SEQ ID NO: 10. In some embodiments, the IL2RG signal peptide or a portion thereof comprises an amino acid sequence at least 80%, at least 90%, at least 95%, at least 99% or 100% identical to SEQ ID NO: 11. In a preferred embodiment, the IL2RG signal peptide or a portion thereof comprises and amino acid sequence of SEQ ID NO: 11. In some embodiments, the CD8 signal peptide or a portion thereof comprises an amino acid sequence at least 80%, at least 90%, at least 95%, at least 99% or 100% identical to SEQ ID NO: 12. In a preferred embodiment, the CD8 signal peptide or a portion thereof comprises and amino acid sequence of SEQ ID NO: 12.

[0035] In some embodiments, the transmembrane domain comprises a TNFR2 transmembrane domain or a portion thereof, CD2 transmembrane domain or a portion thereof, an IL2RB transmembrane domain or a portion thereof or an IL2RG transmembrane domain or a portion thereof.

[0036] In some embodiments, the TNFR2 transmembrane domain or a portion thereof comprises an amino acid sequence at least 80%, at least 90%, at least 95%, at least 99% or 100% identical to SEQ ID NO: 13. In a preferred embodiment, the TNFR2 transmembrane domain or a portion thereof comprises the amino acid sequence of SEQ ID NO ID NO: 13. In some embodiments, the CD2 transmembrane domain or a portion thereof comprises an amino acid sequence at least 80%, at least 90%, at least 95%, at least 99% or 100% identical to SEQ ID NO: 14. In a preferred embodiment, the CD2 transmembrane domain or a portion thereof comprises the amino acid sequence of SEQ ID NO ID NO: 14. In some embodiments, the IL2RB transmembrane domain or a portion thereof comprises an amino acid sequence at least 80%, at least 90%, at least 95%, at least 99% or 100% identical to SEQ ID NO: 15. In a preferred embodiment, the IL2RB transmembrane domain or a portion thereof comprises the amino acid sequence of SEQ ID NO ID NO: 15. In some embodiments, the IL2RG transmembrane domain or a portion thereof comprises an amino acid sequence at least 80%, at least 90%, at least 95%, at least 99% or 100% identical to SEQ ID NO: 16. In a preferred embodiment, the IL2RG transmembrane domain or a portion thereof comprises the amino acid sequence of SEQ ID NO ID NO: 16.

[0037] In some embodiments, the activation component does not bind a naturally-occurring molecule. In some embodiments, the activation component binds a naturally-occurring molecules but the CSR does not transduce a signal upon binding of the activation component. In some embodiments, the activation component binds to a non-naturally occurring molecule. In some embodiments, the CSR selectively transduces a signal upon binding of the activation component to a non-naturally occurring molecule.

[0038] In some embodiments, the CSR comprises an amino acid sequence at least 80%, at least 85%, at least 90%, at least 95%, at least 99% or 100% identical to SEQ ID NO: 17. In a preferred embodiment, the CSR comprises an amino acid sequence of SEQ ID NO: 17. In some embodiments, the CSR comprises an amino acid sequence at least 80%, at least 85%, at least 90%, at least 95%, at least 99% or 100% identical to SEQ ID NO: 18. In a preferred embodiment, the CSR comprises an amino acid sequence of SEQ ID NO: 18. In some embodiments, the CSR comprises an amino acid sequence at least 80%, at least 85%, at least 90%, at least 95%, at least 99% or 100% identical to SEQ ID NO: 19. In a preferred embodiment, the CSR comprises an amino acid sequence of SEQ ID NO: 19. In some embodiments, the CSR comprises an amino acid sequence at least 80%, at least 85%, at least 90%, at least 95%, at least 99% or 100% identical to SEQ ID NO: 20. In a preferred embodiment, the CSR comprises an amino acid sequence of SEQ ID NO: 20. In some embodiments, the CSR comprises an amino acid sequence at least 80%, at least 85%, at least 90%, at least 95%, at least 99% or 100% identical to SEQ ID NO: 21. In a preferred embodiment, the CSR comprises an amino acid sequence of SEQ ID NO: 21. In some embodiments, the CSR comprises an amino acid sequence at least 80%, at least 85%, at least 90%, at least 95%, at least 99% or 100% identical to SEQ ID NO: 22. In a preferred embodiment, the CSR comprises an amino acid sequence of SEQ ID NO: 22. In some embodiments, the CSR comprises an amino acid sequence at least 80%, at least 85%, at least 90%, at least 95%, at least 99% or 100% identical to SEQ ID NO: 23. In a preferred embodiment, the CSR comprises an amino acid sequence of SEQ ID NO: 23. In some embodiments, the CSR comprises an amino acid sequence at least 80%, at least 85%, at least 90%, at least 95%, at least 99% or 100% identical to SEQ ID NO: 24. In a preferred embodiment, the CSR comprises an amino acid sequence of SEQ ID NO: 24. In some embodiments, the CSR comprises an amino acid sequence at least 80%, at least 85%, at least 90%, at least 95%, at least 99% or 100% identical to SEQ ID NO: 25. In a preferred embodiment, the CSR comprises an amino acid sequence of SEQ ID NO: 25. In some embodiments, the CSR comprises an amino acid sequence at least 80%, at least 85%, at least 90%, at least 95%, at least 99% or 100% identical to SEQ ID NO: 26. In a preferred embodiment, the CSR comprises an amino acid sequence of SEQ ID NO: 26. In some embodiments, the CSR comprises an amino acid sequence at least 80%, at least 85%, at least 90%, at least 95%, at least 99% or 100% identical to SEQ ID NO: 27. In a preferred embodiment, the CSR comprises an amino acid sequence of SEQ ID NO: 27. In some embodiments, the CSR comprises an amino acid sequence at least 80%, at least 85%, at least 90%, at least 95%, at least 99% or 100% identical to SEQ ID NO: 28. In a preferred embodiment, the CSR comprises an amino acid sequence of SEQ ID NO: 28. In some embodiments, the CSR comprises an amino acid sequence at least 80%, at least 85%, at least 90%, at least 95%, at least 99% or 100% identical to SEQ ID NO: 29. In a preferred embodiment, the CSR comprises an amino acid sequence of SEQ ID NO: 29. In some embodiments, the CSR comprises an amino acid sequence at least 80%, at least 85%, at least 90%, at least 95%, at least 99% or 100% identical to SEQ ID NO: 30. In a preferred embodiment, the CSR comprises an amino acid sequence of SEQ ID NO: 30. In some embodiments, the CSR comprises an amino acid sequence at least 80%, at least 85%, at least 90%, at least 95%, at least 99% or 100% identical to SEQ ID NO: 33. In a preferred embodiment, the CSR comprises an amino acid sequence of SEQ ID NO: 33. In some embodiments, the CSR comprises an amino acid sequence at least 80%, at least 85%, at least 90%, at least 95%, at least 99% or 100% identical to SEQ ID NO: 32. In a preferred embodiment, the CSR comprises an amino acid sequence of SEQ ID NO: 32. In some embodiments, the CSR comprises an amino acid sequence at least 80%, at least 85%, at least 90%, at least 95%, at least 99% or 100% identical to SEQ ID NO: 33. In a preferred embodiment, the CSR comprises an amino acid sequence of SEQ ID NO: 33. In some embodiments, the CSR comprises an amino acid sequence at least 80%, at least 85%, at least 90%, at least 95%, at least 99% or 100% identical to SEQ ID NO: 34. In a preferred embodiment, the CSR comprises an amino acid sequence of SEQ ID NO: 34. In some embodiments, the CSR comprises an amino acid sequence at least 80%, at least 85%, at least 90%, at least 95%, at least 99% or 100% identical to SEQ ID NO: 35. In a preferred embodiment, the CSR comprises an amino acid sequence of SEQ ID NO: 35. In some embodiments, the CSR comprises an amino acid sequence at least 80%, at least 85%, at least 90%, at least 95%, at least 99% or 100% identical to SEQ ID NO: 36. In a preferred embodiment, the CSR comprises an amino acid sequence of SEQ ID NO: 36. In some embodiments, the CSR comprises an amino acid sequence at least 80%, at least 85%, at least 90%, at least 95%, at least 99% or 100% identical to SEQ ID NO: 37. In a preferred embodiment, the CSR comprises an amino acid sequence of SEQ ID NO: 37. In some embodiments, the CSR comprises an amino acid sequence at least 80%, at least 85%, at least 90%, at least 95%, at least 99% or 100% identical to SEQ ID NO: 38. In a preferred embodiment, the CSR comprises an amino acid sequence of SEQ ID NO: 38. In some embodiments, the CSR comprises an amino acid sequence at least 80%, at least 85%, at least 90%, at least 95%, at least 99% or 100% identical to SEQ ID NO: 39. In a preferred embodiment, the CSR comprises an amino acid sequence of SEQ ID NO: 39. In some embodiments, the CSR comprises an amino acid sequence at least 80%, at least 85%, at least 90%, at least 95%, at least 99% or 100% identical to SEQ ID NO: 40. In a preferred embodiment, the CSR comprises an amino acid sequence of SEQ ID NO: 40. In some embodiments, the CSR comprises an amino acid sequence at least 80%, at least 85%, at least 90%, at least 95%, at least 99% or 100% identical to SEQ ID NO: 41. In a preferred embodiment, the CSR comprises an amino acid sequence of SEQ ID NO: 41. In some embodiments, the CSR comprises an amino acid sequence at least 80%, at least 85%, at least 90%, at least 95%, at least 99% or 100% identical to SEQ ID NO: 42. In a preferred embodiment, the CSR comprises an amino acid sequence of SEQ ID NO: 42. In some embodiments, the CSR comprises an amino acid sequence at least 80%, at least 85%, at least 90%, at least 95%, at least 99% or 100% identical to SEQ ID NO: 43. In a preferred embodiment, the CSR comprises an amino acid sequence of SEQ ID NO: 43. In some embodiments, the CSR comprises an amino acid sequence at least 80%, at least 85%, at least 90%, at least 95%, at least 99% or 100% identical to SEQ ID NO: 44. In a preferred embodiment, the CSR comprises an amino acid sequence of SEQ ID NO: 44. In some embodiments, the CSR comprises an amino acid sequence at least 80%, at least 85%, at least 90%, at least 95%, at least 99% or 100% identical to SEQ ID NO: 45. In a preferred embodiment, the CSR comprises an amino acid sequence of SEQ ID NO: 45. In some embodiments, the CSR comprises an amino acid sequence at least 80%, at least 85%, at least 90%, at least 95%, at least 99% or 100% identical to SEQ ID NO: 46. In a preferred embodiment, the CSR comprises an amino acid sequence of SEQ ID NO: 46. In some embodiments, the CSR comprises an amino acid sequence at least 80%, at least 85%, at least 90%, at least 95%, at least 99% or 100% identical to SEQ ID NO: 47. In a preferred embodiment, the CSR comprises an amino acid sequence of SEQ ID NO: 47. In some embodiments, the CSR comprises an amino acid sequence at least 80%, at least 85%, at least 90%, at least 95%, at least 99% or 100% identical to SEQ ID NO: 48. In a preferred embodiment, the CSR comprises an amino acid sequence of SEQ ID NO: 48. In some embodiments, the CSR comprises an amino acid sequence at least 80%, at least 85%, at least 90%, at least 95%, at least 99% or 100% identical to SEQ ID NO: 49. In a preferred embodiment, the CSR comprises an amino acid sequence of SEQ ID NO: 49. In some embodiments, the CSR comprises an amino acid sequence at least 80%, at least 85%, at least 90%, at least 95%, at least 99% or 100% identical to SEQ ID NO: 50. In a preferred embodiment, the CSR comprises an amino acid sequence of SEQ ID NO: 50. In some embodiments, the CSR comprises an amino acid sequence at least 80%, at least 85%, at least 90%, at least 95%, at least 99% or 100% identical to SEQ ID NO: 51. In a preferred embodiment, the CSR comprises an amino acid sequence of SEQ ID NO: 51. In some embodiments, the CSR comprises an amino acid sequence at least 80%, at least 85%, at least 90%, at least 95%, at least 99% or 100% identical to SEQ ID NO: 52. In a preferred embodiment, the CSR comprises an amino acid sequence of SEQ ID NO: 52. In some embodiments, the CSR comprises an amino acid sequence at least 80%, at least 85%, at least 90%, at least 95%, at least 99% or 100% identical to SEQ ID NO: 53. In a preferred embodiment, the CSR comprises an amino acid sequence of SEQ ID NO: 53. In some embodiments, the CSR comprises an amino acid sequence at least 80%, at least 85%, at least 90%, at least 95%, at least 99% or 100% identical to SEQ ID NO: 54. In a preferred embodiment, the CSR comprises an amino acid sequence of SEQ ID NO: 54. In some embodiments, the CSR comprises an amino acid sequence at least 80%, at least 85%, at least 90%, at least 95%, at least 99% or 100% identical to SEQ ID NO: 55. In a preferred embodiment, the CSR comprises an amino acid sequence of SEQ ID NO: 55. In some embodiments, the CSR comprises an amino acid sequence at least 80%, at least 85%, at least 90%, at least 95%, at least 99% or 100% identical to SEQ ID NO: 56. In a preferred embodiment, the CSR comprises an amino acid sequence of SEQ ID NO: 56. In some embodiments, the CSR comprises an amino acid sequence at least 80%, at least 85%, at least 90%, at least 95%, at least 99% or 100% identical to SEQ ID NO: 57. In a preferred embodiment, the CSR comprises an amino acid sequence of SEQ ID NO: 57. In some embodiments, the CSR comprises an amino acid sequence at least 80%, at least 85%, at least 90%, at least 95%, at least 99% or 100% identical to SEQ ID NO: 58. In a preferred embodiment, the CSR comprises an amino acid sequence of SEQ ID NO: 58.

[0039] The present disclosure also provides a non-naturally occurring chimeric stimulatory receptor (CSR) comprising: (a) an ectodomain comprising a signal peptide and an activation component, wherein the signal peptide comprises a CD2 signal peptide or a portion thereof and wherein the activation component comprises a CD2 extracellular domain or a portion thereof and wherein the CD2 extracellular domain or a portion thereof comprises a mutation or truncation; (b) a transmembrane domain, wherein the transmembrane domain comprises a TNFR2 transmembrane domain or a portion thereof; and (c) an intracellular domain, wherein the intracellular domain comprises a TNFR2 intracellular domain or a portion thereof and a CD3ζ protein or a portion thereof.

[0040] The present disclosure also provides a non-naturally occurring chimeric stimulatory receptor (CSR) comprising: (a) an ectodomain comprising a signal peptide and an activation component, wherein the signal peptide comprises a CD2 signal peptide or a portion thereof and wherein the activation component comprises a CD2 extracellular domain or a portion thereof and wherein the CD2 extracellular domain or a portion thereof comprises a mutation or truncation; (b) a transmembrane domain, wherein the transmembrane domain comprises a CD2 transmembrane domain or a portion thereof; and (c) an intracellular domain comprising a TNFR2 intracellular domain or a portion thereof and a CD3ζ protein or a portion thereof.

[0041] The present disclosure provides a nucleic acid sequence encoding any CSR disclosed herein. The present disclosure provides a vector comprising a nucleic acid sequence encoding any CSR disclosed herein. The present disclosure provides a transposon comprising a nucleic acid sequence encoding any CSR disclosed herein.

[0042] The present disclosure provides a cell comprising any CSR disclosed herein. The present disclosure provides a cell comprising a nucleic acid sequence encoding any CSR disclosed herein. The present disclosure provides a cell comprising a vector comprising a nucleic acid sequence encoding any CSR disclosed herein. The present disclosure provides a cell comprising a transposon comprising a nucleic acid sequence encoding any CSR disclosed herein.

[0043] A modified cell disclosed herein can be an allogeneic cell or an autologous cell. In some embodiments, the modified cell is a T cell. In some embodiments, the modified cell is a regulatory T cell. In some embodiments, the modified cell is an effector T cell. In some embodiments, the modified cell is stem memory T cell (TSCM cell) or a TSCM-like cell. In some embodiments, the modified cell is a helper T cell. In some preferred aspects, the modified cell is an allogeneic cell. In some preferred aspects, the modified cell is a regulatory T cell. In some preferred aspects, the modified cell is an effector T cell.

[0044] The present disclosure provides a composition comprising any CSR disclosed herein. The present disclosure provides a composition comprising a nucleic acid sequence encoding any CSR disclosed herein. The present disclosure provides a composition comprising a vector comprising a nucleic acid sequence encoding any CSR disclosed herein. The present disclosure provides a composition comprising a transposon comprising a nucleic acid sequence encoding any CSR disclosed herein. The present disclosure provides a composition comprising a modified cell disclosed herein or a composition comprising a plurality of modified cells disclosed herein.

[0045] The present disclosure provides a modified T lymphocyte (T cell), comprising any CSR disclosed herein. In some embodiments, the modified T cell can further comprise an inducible proapoptotic polypeptide. In some embodiments, CSR is transiently expressed in the modified T cell. In some embodiments, the CSR is stably expressed in the modified T cell. In some embodiments, the inducible proapoptotic polypeptide is stably expressed in the modified T cell.

[0046] In some embodiments, the modified T cell is an allogeneic cell. In some embodiments, the modified T cell is an autologous cell. In some embodiments, the modified T cell is a regulatory T cell, an effector T cell, a stem memory T cell (T_{SCM}) or a helper T cell.

[0047] In some embodiments, the modified T cell further comprises a transgene comprising a sequence encoding an inducible promoter and a sequence encoding a transcription factor or a non-naturally occurring protein sequence. In some embodiments, the transgene comprises a sequence encoding a non-naturally occurring antigen receptor, a sequence encoding a therapeutic polypeptide, or a combination thereof. In some embodiments, the non-naturally occurring antigen receptor comprises a chimeric antigen receptor (CAR). In some preferred aspects, the modified cell is an allogeneic T cell or a modified allogeneic CAR T cell. In some embodiments, the transgene comprises a nucleic sequence encoding Forkhead Box P3 (FoxP3). In some embodiments, a transposon comprises the transgene. In some embodiments, the transposon is a piggyBac transposon, a piggy-Bac like transposon, a Sleeping Beauty transposon, a Helraiser transposon, a To12 transposon or a TcBuster transposon.

[0048] In some embodiments, the modified T cell further comprises a modification of an endogenous sequence encoding a T cell Receptor (TCR), wherein the modification reduces or eliminates a level of expression or activity of the TCR. In some embodiments, the modified T cell further comprises a modification of an endogenous sequence encoding Beta-2-Microglobulin (B2M), wherein the modification reduces or eliminates a level of expression or activity of a major histocompatibility complex (MHC) class I (MHC-I).

[0049] The present disclosure provides a composition comprising any of the modified T cell disclosed herein. In some embodiments, the composition comprises a plurality of the modified T cells of the population comprise any CSR disclosed herein. In some embodiments, the composition comprises a population of modified T cells, wherein a plurality of the modified T cells of the population comprise any of the modified T cell disclosed herein. In some embodiments, the composition disclosed herein is used for the treatment of a disease or disorder.

[0050] The present disclosure provides a method of treating a disease or disorder comprising administering to a subject in need thereof a therapeutically-effective amount of any of the compositions disclosed herein. In some embodiments, method of treating a disease or disorder further comprises at least one non-naturally occurring molecule that binds the CSR.

[0051] The present disclosure provides a method of producing a population of modified T cells comprising introducing into a plurality of primary human T cells a composition comprising any of the CSRs disclosed herein or any of the sequences encoding the same to produce a plurality of modified T cells under conditions that stably express the CSR within the plurality of modified T cells. In some aspects, at least 5%, at least 10%, at least 15%, at least 20%, at least 25%, at least 30%, at least 35%, at least 40%, at least 45%, at least 50%, at least 55%, at least 60%, at least 65%, at least 70%, at least 75%, at least 80%, at least 85%, at least 90%, at least 95%, at least 96%, at least 97%, at least 98%, at least 99%, or 100% of the population comprises the CSR.

[0052] The present disclosure provides a method of producing a population of modified T cells comprising introducing into a plurality of primary human T cells a composition comprising any of the CSRs disclosed herein or any of the sequences encoding the same to produce a plurality of modified T cells under conditions that transiently express the CSRs within the plurality of modified T cells. In some aspects, at least 5%, at least 10%, at least 15%, at least 20%, at least 25%, at least 30%, at least 35%, at least 40%, at least 45%, at least 50%, at least 55%, at least 60%, at least 65%, at least 70%, at least 75%, at least 80%, at least 85%, at least 90%, at least 95%, at least 96%, at least 97%, at least 98%, at least 99%, or 100% of the population comprises the CSR.

[0053] The present disclosure provides a method of treating a disease or disorder comprising administering to a subject in need thereof a therapeutically-effective amount of any of the compositions disclosed herein. In some embodiments, the modified T cells within the population of modified T cells administered to the subject no longer express the CSR.

[0054] The present disclosure provides a method of expanding a population of modified T cells comprising introducing into a plurality of primary human T cells a composition comprising any of the CSRs disclosed herein or any of the sequences disclosed herein encoding the same to produce a plurality of modified T cells under conditions that stably express the CSR within the plurality of modified T cells and preserve desirable stem-like properties of the plurality of modified T cells and contacting the cells with an activator composition to produce a plurality of activated modified T cells, wherein expansion of the plurality of modified T cells is at least two fold higher than the expansion of a plurality of wild-type T cells not stably expressing the CSR under the same conditions. In some aspects, at least 5%, at least 10%, at least 15%, at least 20%, at least 25%, at least 30%, at least 35%, at least 40%, at least 45%, at least 50%, at least 55%, at least 60%, at least 65%, at least 70%, at least 75%, at least 80%, at least 85%, at least 90%, at least 95%, at least 96%, at least 97%, at least 98%, at least 99%, or 100% of the population comprises the CSR.

[0055] The present disclosure provides a composition comprising a population of modified T cells expanded by any method disclosed herein. In some embodiments, the composition is used in the treatment of a disease or disorder.

[0056] The present disclosure provides a method of expanding a population of modified T cells comprising introducing into a plurality of primary human T cells a composition comprising any of the CSRs disclosed herein or any of the sequences disclosed herein encoding the same to produce a plurality of modified T cells under conditions that transiently express the CSR within the plurality of modified T cells and preserve desirable stem-like properties of the plurality of modified T cells and contacting the cells with an activator composition to produce a plurality of activated modified T cells, wherein expansion of the plurality of modified T cells is at least two fold higher than the expansion of a plurality of wild-type T cells not transiently expressing the CSR under the same conditions. In some aspects, at least 5%, at least 10%, at least 15%, at least 20%, at least 25%, at least 30%, at least 35%, at least 40%, at least 45%, at least 50%, at least 55%, at least 60%, at least 65%, at least 70%, at least 75%, at least 80%, at least 85%, at least 90%, at least 95%, at least 96%, at least 97%, at least 98%, at least 99%, or 100% of the population comprises the CSR.

[0057] The present disclosure provides a composition comprising a population of modified T cells produced by any of the methods disclosed herein. In some embodiments, the composition is used in the treatment of a disease or disorder. The present disclosure also provides a method of treating a disease or disorder comprising administering to a subject in need thereof a therapeutically-effective amount of any of the compositions disclosed herein. In some embodiments, the method further comprises administering an activator composition to the subject to activate the population of modified T cells in vivo, to induce cell division of the population of modified T cells in vivo, or a combination thereof. In some embodiments, the modified T cells within the population of modified T cells administered to the subject no longer express the CSR.

[0058] Any of the above aspects can be combined with any other aspect.

[0059] Unless otherwise defined, all technical and scientific terms used herein have the same meaning as commonly understood by one of ordinary skill in the art to which this disclosure belongs. In the Specification, the singular forms also include the plural unless the context clearly dictates otherwise; as examples, the terms “a,” “an,” and “the” are understood to be singular or plural and the term “or” is understood to be inclusive. By way of example, “an element” means one or more element. Throughout the specification the word “comprising,” or variations such as “comprises” or “comprising,” will be understood to imply the inclusion of a stated element, integer or step, or group of elements, integers or steps, but not the exclusion of any other element, integer or step, or group of elements, integers or steps. About can be understood as within 10%, 9%, 8%, 7%, 6%, 5%, 4%, 3%, 2%, 1%, 0.5%, 0.1%, 0.05%, or 0.01% of the stated value. Unless otherwise clear from the context, all numerical values provided herein are modified by the term “about.”

[0060] Although methods and materials similar or equivalent to those described herein can be used in the practice or testing of the present disclosure, suitable methods and materials are described below. All publications, patent applications, patents, and other references mentioned herein are incorporated by reference in their entirety. The references cited herein are not admitted to be prior art to the claimed invention. In the case of conflict, the present Specification, including definitions, will control. In addition, the materials, methods, and examples are illustrative only and are not intended to be limiting. Other features and advantages of the disclosure will be apparent from the following detailed description and claims.

### BRIEF DESCRIPTION OF THE DRAWINGS

[0061] The patent or application file contains at least one drawing executed in color. Copies of this patent or patent application publication with color drawing(s) will be provided by the Office upon request and payment of the necessary fee.

[0062] FIG. 1 is a schematic diagram depicting exemplary chimeric stimulatory receptors (CSRs) of the disclosure. A schematic of a CSR control is shown (CD2z V2). The CSRs of the disclosure contain a TNFR2 and a CD3z intracellular domain (11. 2DH.TF2z; 12. 2DH.2TF2z WT; 33. 82DH.TF2z; 34. 82DH.2TF2z WT). These CSRs contain a mutated CD2 ectodomain with either a CD2 or a CD8a signal peptide. These CSRs contain either a TNFR2 or a CD2 transmembrane domain. These CSR constructs specifically promote differentiation and expansion of Treg or Treg-like cells.

[0063] FIG. 2 is a schematic diagram depicting exemplary CSRs of the disclosure. These CSRs contain an IL2RB, IL2RG or CD3z intracellular domain, or a combination thereof. Some of these CSRs contain a mutated CD2 ectodomain with a CD2 signal peptide. Others contain an IL2RB or IL2RG ectodomain with a native signal peptide. These CSRs contain either an IL2RB, IL2RG, or CD2 transmembrane domain. These CSR constructs specifically promote differentiation, expansion, and function of Treg or Treg-like cells. These CSR constructs also specifically promote differentiation, expansion, and function of effector T cells or effector-like T cells.

[0064] FIG. 3 is a schematic diagram depicting exemplary CSRs of the disclosure. These CSRs contain an IL2RB, IL2RG or CD3z intracellular domain, or a combination thereof. Some of these CSRs contain a mutated CD2 ectodomain. Others contain an IL2RB or IL2RG ectodomain with a native signal peptide. These CSRs contain either an IL2RB, IL2RG, or CD2 transmembrane domain. These CSR constructs specifically promote differentiation, expansion, and function of Treg or Treg-like cells. These CSR constructs also specifically promote differentiation, expansion, and function of effector T cells or effector-like T cells. These CSR constructs have a CD8a signal peptide.

[0065] FIG. 4 is a schematic outlining timeline and protocol for the expansion of Tregs using a CSR booster.

[0066] FIG. 5A-5B is a series of graphs depicting the cellular expansion and viability of Treg cells that were modified to express a CSR or not (mock), during the expansion process outlined in FIG. 4. FIG. 5A shows the fold cellular expansion and viability of modified Treg cells in Donor 3. FIG. 5B shows the fold cellular expansion and viability of modified Treg cells in Donor 6.

### DETAILED DESCRIPTION OF THE INVENTION

[0067] Successful immunosuppressive therapy with regulatory T (Treg) cells requires persistence and suppressive function. Phenotypic plasticity may be a necessary homeostatic adaptive function of Tregs, but in the setting of transplant, autoimmune, allergy or inflammation disease, it raises clinical safety concerns. A key challenge in the field of Treg expansion, manufacturing and production is to achieve sufficient ex vivo expansion of bona-fide Tregs that are free from effector CD4 T cell contamination and that maintain their classical Forkhead box P3 (FoxP3)+ signature.

[0068] There are several mechanisms by which Tregs maintain FoxP3+ expression and immunosuppressive function. The inventors have further recognized that tumor necrosis factor receptor-2 (TNFR2) and interleukin-2 (IL-2) are crucial for the maintenance of FoxP3 expression in patients and in murine models. TNFR2 costimulation has been shown to provide signals to Treg progenitors to specifically promote Treg differentiation and shape the Treg repertoire in vivo. Tregs also express IL-2 receptors (IL2R) and signaling through IL2R pathway is essential for the proliferation and function of Tregs. Binding of a ligand to IL2R drives STATS activation which correlates with Treg proliferative capacity, with expression of FoxP3, and with maintenance of the immunosuppressive function of Tregs. Therefore, approaches that induce TNFR2 and IL2R signaling are desirable for Treg expansion and therapy.

[0069] Due to their inherent poor expansion ex vivo, several strategies have previously been implemented to produce sufficient Treg cells for a one-time autologous dose. For example, Treg cells can be supplemented with a high dose IL-2 to enable Treg expansion. However, IL-2 promotes the expansion of both Tregs and effector T cells. Unlike Tregs which have an immunosuppressive function, effector T cells have a pro-inflammatory function which may have a detrimental effect in the recipient. Other strategies include treatment of T cells with multiple rounds of CD3 or CD28 restimulation and/or addition of supplements such as rapamycin. These strategies may cause differentiation of Tregs due to over-stimulus and may contribute to a shift in the basal properties of bona-fide Tregs.

[0070] The present disclosure provides an engineered regulatory T cell that expresses one or more chimeric stimulatory receptors (CSRs) that specifically promote ex vivo expansion of Treg without the differentiation of the Treg cells into other T cell types. Tregs that express CSRs provide an opportunity to generate antigen-specific Tregs for adoptive cell therapy. There are differences in function and signaling between Tregs and T effector cells (Teff). Accordingly, embodiments of the invention are directed to CSRs with a signaling region that maximizes the suppressive capacity and stability of Tregs for use in, but not limited to, cell therapies for treatment of autoimmune disorders (e.g., multiple sclerosis, rheumatoid arthritis, Type 1 diabetes, Crohn's disease), graft-versus-host disease, inflammatory diseases, and transplant rejection (e.g., kidney transplant or lung transplant).

[0071] The present disclosure provides an engineered regulatory T cell that express one or more chimeric stimulatory receptors (CSRs) that specifically promote ex vivo expansion of Teff without the differentiation of the Teff cells into other T cell types. Accordingly, embodiments of the invention are directed to CSRs with a signaling region that maximizes the effector function of Teffs for use in, but not limited to, treatment of cancer or infectious diseases (such as but not limited to bacterial, viral, pathogenic fungi and yeast or parasitic infections).

[0072] The present disclosure provides an engineered T cell that expresses an inducible cell surface markers of Tregs in order to direct and promote the ex vivo expansion of Treg cells without the differentiation into other cell types. Accordingly, some embodiments of the invention are directed to the constitutive expression of a FoxP3 Treg cell surface marker on T cells, for use in but not limited to cell therapies for autoimmune disorders, graft-versus-host disease, inflammatory diseases, and transplant rejection. Embodiments of the invention are directed to the expression of transcription factors that cause the expression of FoxP3 Treg cell surface marker on T cells, for use in but not limited to cell therapies for treatment of autoimmune disorders (e.g., multiple sclerosis, rheumatoid arthritis, Type 1 diabetes, Crohn's disease), graft-versus-host disease, inflammatory diseases, and transplant rejection (e.g., kidney transplant or lung transplant).

[0073] The present disclosure provides compositions and methods of optimizing the intracellular signaling region of a CSR for regulatory T cell function. This includes, but is not limited to, incorporating the signaling domains or combinations of intracellular signaling domains embodied herein, subsets of their sequences, domains derived from other species or viruses, non-immune signaling domains, synthetic domains or combinations thereof. These signaling architectures designed to maximize Treg function can be present in a CSR or any other chimeric receptor whose extracellular antigen recognition moiety includes, but is not limited to, a single chain antibody fragment (scFv), a VH, a VHH, a Centyrin, a nanobody, a single domain antibody or another type of antibody-based molecule, or a functional non-T cell receptor, or any other antigen recognition molecule.

[0074] In some embodiments the CSR includes an extracellular antigen recognition moiety that does not bind to IL2 and includes an intracellular signaling domain of TNFR2, an intracellular signaling domain of IL2 receptor beta (IL2RB) and/or an intracellular signaling domain of IL2 receptor gamma (IL2RG). Addition of a ligand that binds to the extracellular domain allows controlled signaling through the IL2RB, IL2RG and TNFR2 intracellular domains resulting in the ability to control Treg proliferation, differentiation and ultimately stability and longevity. Accordingly, the compositions of the present disclosure may bypass the need to supplement a T cell medium with a high dose IL-2 to enable Treg expansion. Without the use of IL-2 ligand that promotes the expansion of both Tregs and effector T cells, the compositions may eliminate effector T cell contamination during T cell expansion. The compositions of the present disclosure also may eliminate the requirement to use multiple rounds of CD3 or CD28 restimulation and/or addition of supplements such as rapamycin that may contribute to overstimulation and differentiation of Tregs to other T cell types.

[0075] In some embodiments, the disclosure provides compositions and methods that result in increased longevity and persistence of Treg phenotype. In some embodiments, the disclosure provides Treg cells and methods that combine persistence and longevity. In some embodiments, Treg cells are maintained in the suppressive state. Without the use of the presently disclosed compositions and methods, adoptively transferred Treg cells can differentiate to other T cell types, whether the autologous or allogeneic, and may become pro-inflammatory and thus cause exacerbation of inflammatory disease.

[0076] The present disclosure provides a non-naturally occurring chimeric stimulatory receptor (CSR) comprising, consisting essential of, or consisting of: (a) an ectodomain comprising a activation component, wherein the activation component is isolated or derived from a first protein; (b) a transmembrane domain; and (c) at least one intracellular domain, wherein the intracellular domain is isolated or derived from a second protein, wherein the first and the second protein are not identical.

[0077] The activation component can comprise, consist essentially of, or consist of: one or more of a component of a human transmembrane receptor, a human cell-surface receptor, a T cell Receptor (TCR), a component of a TCR complex, a component of a TCR co-receptor, a component of a TCR co-stimulatory protein, a component of a TCR inhibitory protein, a cytokine receptor, or a chemokine receptor. The activation component can comprise, consist essentially of, or consist of, but are not limited to: a portion of one or more of a component of a T cell Receptor (TCR), a component of a TCR complex, a component of a TCR co-receptor, a component of a TCR co-stimulatory protein, a component of a TCR inhibitory protein, a cytokine receptor, or a chemokine receptor to which an agonist of the activation component binds.

[0078] The ectodomain can comprise, consist essentially of, or consist of: a CD2 extracellular domain or a portion thereof to which an agonist binds, or the ectodomain can comprise, consist essentially of, or consist of: an IL2RB extracellular domain or a portion thereof to which an agonist binds, or the ectodomain can comprise, consist essentially of, or consist of: an IL2RG extracellular domain or a portion thereof to which an agonist binds. The activation component can comprise, consist essentially of, or consist of: a CD2 extracellular domain or a portion thereof to which an agonist binds, or the activation component can comprise, consist essentially of, or consist of: an IL2RB extracellular domain or a portion thereof to which an agonist binds or the activation component can comprise, consist essentially of, or consist of: an IL2RG extracellular domain or a portion thereof to which an agonist binds. The CD2 extracellular domain to which an agonist binds comprises, consists essentially of, or consists of the amino acid sequence at least 95% identical to the amino acid sequence of SEQ ID NO: 1. The CD2 extracellular domain to which an agonist binds comprises, consists essentially of, or consists of the amino acid sequence at least 99% identical to the amino acid sequence of SEQ ID NO: 1. The CD2 extracellular domain to which an agonist binds comprises, consists essentially of, or consists of the amino acid sequence of SEQ ID NO: 1. The IL2RB extracellular domain to which an agonist binds comprises, consists essentially of, or consists of the amino acid sequence at least 95% identical to the amino acid sequence of SEQ ID NO: 2. The IL2RB extracellular domain to which an agonist binds comprises, consists essentially of, or consists of the amino acid sequence at least 99% identical to the amino acid sequence of SEQ ID NO: 2. The IL2RB extracellular domain to which an agonist binds comprises, consists essentially of, or consists of the amino acid sequence of SEQ ID NO: 2. The IL2RG extracellular domain to which an agonist binds comprises, consists essentially of, or consists of the amino acid sequence at least 95% identical to the amino acid sequence of SEQ ID NO: 3. The IL2RG extracellular domain to which an agonist binds comprises, consists essentially of, or consists of the amino acid sequence at least 99% identical to the amino acid sequence of SEQ ID NO: 3. The IL2RG extracellular domain to which an agonist binds comprises, consists essentially of, or consists of the amino acid sequence of SEQ ID NO: 3.

[0079] In some aspects, the ectodomain of the CSR of the present disclosure can comprise a modification. The modification can comprise a mutation or a truncation in the amino acid sequence of the activation component or the first protein when compared to a wild type amino acid sequence of the activation component or the first protein. The mutation or a truncation in the amino acid sequence of the activation component or the first protein can comprise a mutation or truncation of a CD2 extracellular domain or a portion thereof to which an agonist binds. The mutation or truncation of the CD2 extracellular domain reduces or eliminates binding with naturally occurring CD58.

[0080] A reduction in binding is when at least 50%, at least 75%, at least 90%, at least 91%, at least 92%, at least 93%, at least 94%, at least 95%, at least 96%, at least 97%, at least 98%, or at least 99% of the binding ability of the mutated or truncated CD2 extracellular domain is reduced when compared to the naturally occurring wild-type counterpart. An elimination in binding is when 100% of the binding ability of the mutated or truncated CD2 extracellular domain is reduced when compared to the naturally occurring wild-type CD2 extracellular domain.

[0081] The mutated or truncated CD2 extracellular domain binds anti-CD2 activating agonists and anti-CD2 activating molecules but does not bind naturally occurring CD58. The mutated or truncated CD2 extracellular domain comprises, consists essentially of, or consists of the amino acid sequence at least 80% identical to the amino acid sequence of SEQ ID NO: 4. The mutated or truncated CD2 extracellular domain comprises, consists essentially of, or consists of the amino acid sequence at least 85% identical to the amino acid sequence of SEQ ID NO: 4. The mutated or truncated CD2 extracellular domain comprises, consists essentially of, or consists of the amino acid sequence at least 90% identical to the amino acid sequence of SEQ ID NO: 4. The mutated or truncated CD2 extracellular domain comprises, consists essentially of, or consists of the amino acid sequence at least 95% identical to the amino acid sequence of SEQ ID NO: 4. The mutated or truncated CD2 extracellular domain comprises, consists essentially of, or consists of the amino acid sequence at least 99% identical to the amino acid sequence of SEQ ID NO: 4. The mutated or truncated CD2 extracellular domain comprises, consists essentially of, or consists of the amino acid sequence of SEQ ID NO: 4.

[0082] The intracellular domain can be isolated or derived from a third protein. In some aspects, the first protein and the third protein of a CSR of the present disclosure are identical. The intracellular domain can comprise, consist essentially of, or consist of: one or more of a component of a human signal transduction domain, T cell Receptor (TCR), a component of a TCR complex, a component of a TCR co-receptor, a component of a TCR co-stimulatory protein, a component of a TCR inhibitory protein, a cytokine receptor, or a chemokine receptor. The second protein can comprise, consist essentially of, or consist of: a CD3 protein or a portion thereof. The intracellular transduction domain can comprise, consist essentially of, or consist of a CD3 protein or a portion thereof. The CD3 protein can comprise, consist essentially of, or consist of a CD3ζ protein or a portion thereof. The CD3ζ protein comprises, consists essentially of, or consists of the amino acid sequence at least 95% identical to the amino acid sequence of SEQ ID NO: 5. The CD3ζ protein comprises, consists essentially of, or consists of the amino acid sequence at least 99% identical to the amino acid sequence of SEQ ID NO: 5. The CD3 protein comprises, consists essentially of, or consists of the amino acid sequence of SEQ ID NO: 5.

[0083] The intracellular domain can comprise, consist essentially of, or consist of a TNFR2 intracellular domain or a portion thereof, or the intracellular domain can comprise, consist essentially of, or consist of an IL2RB intracellular domain or a portion thereof, or the intracellular domain can comprise, consist essentially of, or consist of an IL2RG intracellular domain or a portion thereof. The TNFR2 intracellular domain comprises, consists essentially of, or consists of the amino acid sequence at least 95% identical to the amino acid sequence of SEQ ID NO: 6. The TNFR2 intracellular domain comprises, consists essentially of, or consists of the amino acid sequence at least 99% identical to the amino acid sequence of SEQ ID NO: 6. The TNFR2 intracellular domain comprises, consists essentially of, or consists of the amino acid sequence of SEQ ID NO: 6. The IL2RB intracellular domain comprises, consists essentially of, or consists of the amino acid sequence at least 95% identical to the amino acid sequence of SEQ ID NO: 7. The IL2RB intracellular domain comprises, consists essentially of, or consists of the amino acid sequence at least 99% identical to the amino acid sequence of SEQ ID NO: 7. The IL2RB intracellular domain comprises, consists essentially of, or consists of the amino acid sequence of SEQ ID NO: 7. The IL2RG intracellular domain comprises, consists essentially of, or consists of the amino acid sequence at least 95% identical to the amino acid sequence of SEQ ID NO: 8. The IL2RG intracellular domain comprises, consists essentially of, or consists of the amino acid sequence at least 99% identical to the amino acid sequence of SEQ ID NO: 8. The IL2RG intracellular domain comprises, consists essentially of, or consists of the amino acid sequence of SEQ ID NO: 8.

[0084] The ectodomain of a CSR of the present disclosure can further comprise, consist essentially of, or consist of a signal peptide. The signal peptide can be isolated or derived from a third protein. In some aspects, the first protein and the third protein of a CSR of the present disclosure are identical. The signal peptide can comprise, consist essentially of, or consist of: a CD2 signal peptide or a portion thereof; the signal peptide can comprise, consist essentially of, or consist of: an IL2RB signal peptide or a portion thereof; the signal peptide can comprise, consist essentially of, or consist of: an IL2RG signal peptide or a portion thereof; or the signal peptide can comprise, consist essentially of, or consist of: a CD8a signal peptide or a portion thereof. A CSR comprising a CD8a signal peptide may increase the levels of CSR surface expression. The CD2 signal peptide comprises, consists essentially of, or consists of the amino acid sequence at least 95% identical to the amino acid sequence of SEQ ID NO: 9. The CD2 signal peptide comprises, consists essentially of, or consists of the amino acid sequence at least 99% identical to the amino acid sequence of SEQ ID NO: 9. The CD2 signal peptide comprises, consists essentially of, or consists of the amino acid sequence of SEQ ID NO: 9. The IL2RB signal peptide comprises, consists essentially of, or consists of the amino acid sequence at least 95% identical to the amino acid sequence of SEQ ID NO: 10. The IL2RB signal peptide comprises, consists essentially of, or consists of the amino acid sequence at least 99% identical to the amino acid sequence of SEQ ID NO: 10. The IL2RB signal peptide comprises, consists essentially of, or consists of the amino acid sequence of SEQ ID NO: 10. The IL2RG signal peptide comprises, consists essentially of, or consists of the amino acid sequence at least 95% identical to the amino acid sequence of SEQ ID NO: 11. The IL2RG signal peptide comprises, consists essentially of, or consists of the amino acid sequence at least 99% identical to the amino acid sequence of SEQ ID NO: 11. The IL2RG signal peptide comprises, consists essentially of, or consists of the amino acid sequence of SEQ ID NO: 11. The CD8a signal peptide comprises, consists essentially of, or consists of the amino acid sequence at least 95% identical to the amino acid sequence of SEQ ID NO: 12. The CD8a signal peptide comprises, consists essentially of, or consists of the amino acid sequence at least 99% identical to the amino acid sequence of SEQ ID NO: 12. The CD8a signal peptide comprises, consists essentially of, or consists of the amino acid sequence of SEQ ID NO: 12.

[0085] The transmembrane domain of a CSR of the present disclosure can be isolated or derived from a fourth protein. In some aspects, the first protein and the fourth protein of a CSR of the present disclosure are identical. The transmembrane domain can comprise, consist essentially of, or consist of: a TNFR2 transmembrane domain or a portion thereof; the transmembrane domain can comprise, consist essentially of or consist of: a CD2 transmembrane domain or a portion thereof; the transmembrane domain can comprise, consist essentially of or consist of: an IL2RB transmembrane domain or a portion thereof; or the transmembrane domain can comprise, consist essentially of, or consist of: an IL2RG transmembrane domain or a portion thereof. The TNFR2 transmembrane domain comprises, consists essentially of, or consists of the amino acid sequence at least 95% identical to the amino acid sequence of SEQ ID NO: 13. The TNFR2 transmembrane domain comprises, consists essentially of, or consists of the amino acid sequence at least 99% identical to the amino acid sequence of SEQ ID NO: 13. The TNFR2 transmembrane domain comprises, consists essentially of, or consists of the amino acid sequence of SEQ ID NO: 13. The CD2 transmembrane domain comprises, consists essentially of, or consists of the amino acid sequence at least 95% identical to the amino acid sequence of SEQ ID NO: 14. The CD2 transmembrane domain comprises, consists essentially of, or consists of the amino acid sequence at least 99% identical to the amino acid sequence of SEQ ID NO: 14. The CD2 transmembrane domain comprises, consists essentially of, or consists of the amino acid sequence of SEQ ID NO: 14. The IL2RB transmembrane domain comprises, consists essentially of, or consists of the amino acid sequence at least 95% identical to the amino acid sequence of SEQ ID NO: 15. The IL2RB transmembrane domain comprises, consists essentially of, or consists of the amino acid sequence at least 99% identical to the amino acid sequence of SEQ ID NO: 15. The IL2RB transmembrane domain comprises, consists essentially of, or consists of the amino acid sequence of SEQ ID NO: 15. The IL2RG transmembrane domain comprises, consists essentially of, or consists of the amino acid sequence at least 95% identical to the amino acid sequence of SEQ ID NO: 16. The IL2RG transmembrane domain comprises, consists essentially of, or consists of the amino acid sequence at least 99% identical to the amino acid sequence of SEQ ID NO: 16. The IL2RG transmembrane domain comprises, consists essentially of, or consists of the amino acid sequence of SEQ ID NO: 16.

[0086] The CSR of the disclosure comprising a CD2 signal peptide, a mutated or truncated CD2 extracellular domain, a TNFR2 transmembrane domain, a TNFR2 intracellular domain and a CD3z intracellular domain comprises, consists essentially of, or consists of the amino acid sequence at least 90% identical to the amino acid sequence of SEQ ID NO: 17. The CSR of the disclosure comprising a CD2 signal peptide, a mutated or truncated CD2 extracellular domain, a TNFR2 transmembrane domain, a TNFR2 intracellular domain and a CD3z intracellular domain comprises, consists essentially of, or consists of the amino acid sequence at least 95% identical to the amino acid sequence of SEQ ID NO: 141. The CSR of the disclosure comprising a CD2 signal peptide, a mutated or truncated CD2 extracellular domain, a TNFR2 transmembrane domain, a TNFR2 intracellular domain and a CD3z intracellular domain comprises, consists essentially of, or consists of the amino acid sequence at least 99% identical to the amino acid sequence of SEQ ID NO: 141. The CSR of the disclosure comprising a CD2 signal peptide, a mutated or truncated CD2 extracellular domain, a TNFR2 transmembrane domain, a TNFR2 intracellular domain and a CD3z intracellular domain comprises, consists essentially of, or consists of the amino acid sequence of SEQ ID NO: 141.

[0087] The CSR of the disclosure comprising a CD2 signal peptide, a mutated or truncated CD2 extracellular domain, a CD2 transmembrane domain, a TNFR2 intracellular domain and a CD3z intracellular domain comprises, consists essentially of, or consists of the amino acid sequence at least 90% identical to the amino acid sequence of SEQ ID NO: 18. The CSR of the disclosure comprising a CD2 signal peptide, a mutated or truncated CD2 extracellular domain, a CD2 transmembrane domain, a TNFR2 intracellular domain and a CD3z intracellular domain comprises, consists essentially of, or consists of the amino acid sequence at least 95% identical to the amino acid sequence of SEQ ID NO: 18. The CSR of the disclosure comprising a CD2 signal peptide, a mutated or truncated CD2 extracellular domain, a CD2 transmembrane domain, a TNFR2 intracellular domain and a CD3z intracellular domain comprises, consists essentially of, or consists of the amino acid sequence at least 99% identical to the amino acid sequence of SEQ ID NO: 18. The CSR of the disclosure comprising a CD2 signal peptide, a mutated or truncated CD2 extracellular domain, a CD2 transmembrane domain, a TNFR2 intracellular domain and a CD3z intracellular domain comprises, consists essentially of, or consists of the amino acid sequence of SEQ ID NO: 18.

[0088] The CSR of the disclosure comprising an IL2RB signal peptide, an IL2RB extracellular domain, an IL2RB transmembrane domain, an IL2RB intracellular domain and a CD3z intracellular domain comprises, consists essentially of, or consists of the amino acid sequence at least 90% identical to the amino acid sequence of SEQ ID NO: 19. The CSR of the disclosure comprising an IL2RB signal peptide, an IL2RB extracellular domain, an IL2RB transmembrane domain, an IL2RB intracellular domain and a CD3z intracellular domain comprises, consists essentially of, or consists of the amino acid sequence at least 95% identical to the amino acid sequence of SEQ ID NO: 19. The CSR of the disclosure comprising an IL2RB signal peptide, an IL2RB extracellular domain, an IL2RB transmembrane domain, an IL2RB intracellular domain and a CD3z intracellular domain comprises, consists essentially of, or consists of the amino acid sequence at least 99% identical to the amino acid sequence of SEQ ID NO: 19. The CSR of the disclosure comprising an IL2RB signal peptide, an IL2RB extracellular domain, an IL2RB transmembrane domain, an IL2RB intracellular domain and a CD3z intracellular domain comprises, consists essentially of, or consists of the amino acid sequence of SEQ ID NO: 19.

[0089] The CSR of the disclosure comprising a CD2 signal peptide, a mutated or truncated CD2 extracellular domain, an IL2RB transmembrane domain and an IL2RB intracellular domain comprises, consists essentially of, or consists of the amino acid sequence at least 90% identical to the amino acid sequence of SEQ ID NO: 20. The CSR of the disclosure comprising a CD2 signal peptide, a mutated or truncated CD2 extracellular domain, an IL2RB transmembrane domain and an IL2RB intracellular domain comprises, consists essentially of, or consists of the amino acid sequence at least 95% identical to the amino acid sequence of SEQ ID NO: 20. The CSR of the disclosure comprising a CD2 signal peptide, a mutated or truncated CD2 extracellular domain, an IL2RB transmembrane domain and an IL2RB intracellular domain comprises, consists essentially of, or consists of the amino acid sequence at least 99% identical to the amino acid sequence of SEQ ID NO: 20. The CSR of the disclosure comprising a CD2 signal peptide, a mutated or truncated CD2 extracellular domain, an IL2RB transmembrane domain and an IL2RB intracellular domain comprises, consists essentially of, or consists of the amino acid sequence of SEQ ID NO: 20.

[0090] The CSR of the disclosure comprising a CD2 signal peptide, a mutated or truncated CD2 extracellular domain, an IL2RB transmembrane domain, an IL2RB intracellular domain and a CD3z intracellular domain comprises, consists essentially of, or consists of the amino acid sequence at least 90% identical to the amino acid sequence of SEQ ID NO: 21. The CSR of the disclosure comprising a CD2 signal peptide, a mutated or truncated CD2 extracellular domain, an IL2RB transmembrane domain, IL2RB intracellular domain and a CD3z intracellular domain comprises, consists essentially of, or consists of the amino acid sequence at least 95% identical to the amino acid sequence of SEQ ID NO: 21. The CSR of the disclosure comprising a CD2 signal peptide, a mutated or truncated CD2 extracellular domain, an IL2RB transmembrane domain, IL2RB intracellular domain and a CD3z intracellular domain comprises, consists essentially of, or consists of the amino acid sequence at least 99% identical to the amino acid sequence of SEQ ID NO: 21. The CSR of the disclosure comprising a CD2 signal peptide, a mutated or truncated CD2 extracellular domain, an IL2RB transmembrane domain, an IL2RB intracellular domain and a CD3z intracellular domain comprises, consists essentially of, or consists of the amino acid sequence of SEQ ID NO: 21.

[0091] The CSR of the disclosure comprising a CD2 signal peptide, a mutated or truncated CD2 extracellular domain, a CD2 transmembrane domain and an IL2RB intracellular domain comprises, consists essentially of, or consists of the amino acid sequence at least 90% identical to the amino acid sequence of SEQ ID NO: 22. The CSR of the disclosure comprising a CD2 signal peptide, a mutated or truncated CD2 extracellular domain, a CD2 transmembrane domain and an IL2RB intracellular domain comprises, consists essentially of, or consists of the amino acid sequence at least 95% identical to the amino acid sequence of SEQ ID NO: 22. The CSR of the disclosure comprising a CD2 signal peptide, a mutated or truncated CD2 extracellular domain, a CD2 transmembrane domain and an IL2RB intracellular domain comprises, consists essentially of, or consists of the amino acid sequence at least 99% identical to the amino acid sequence of SEQ ID NO: 22. The CSR of the disclosure comprising a CD2 signal peptide, a mutated or truncated CD2 extracellular domain, a CD2 transmembrane domain and an IL2RB intracellular domain comprises, consists essentially of, or consists of the amino acid sequence of SEQ ID NO: 22.

[0092] The CSR of the disclosure comprising a CD2 signal peptide, a mutated or truncated CD2 extracellular domain, a CD2 transmembrane domain, an IL2RB intracellular domain and a CD3z intracellular domain comprises, consists essentially of, or consists of the amino acid sequence at least 90% identical to the amino acid sequence of SEQ ID NO: 23. The CSR of the disclosure comprising a CD2 signal peptide, a mutated or truncated CD2 extracellular domain, a CD2 transmembrane domain, IL2RB intracellular domain and a CD3z intracellular domain comprises, consists essentially of, or consists of the amino acid sequence at least 95% identical to the amino acid sequence of SEQ ID NO: 23. The CSR of the disclosure comprising a CD2 signal peptide, a mutated or truncated CD2 extracellular domain, a CD2 transmembrane domain, IL2RB intracellular domain and a CD3z intracellular domain comprises, consists essentially of, or consists of the amino acid sequence at least 99% identical to the amino acid sequence of SEQ ID NO: 23. The CSR of the disclosure comprising a CD2 signal peptide, a mutated or truncated CD2 extracellular domain, a CD2 transmembrane domain, an IL2RB intracellular domain and a CD3z intracellular domain comprises, consists essentially of, or consists of the amino acid sequence of SEQ ID NO: 23.

[0093] The CSR of the disclosure comprising an IL2RG signal peptide, an IL2RG extracellular domain, an IL2RG transmembrane domain, an IL2RG intracellular domain and a CD3z intracellular domain comprises, consists essentially of, or consists of the amino acid sequence at least 90% identical to the amino acid sequence of SEQ ID NO: 24. The CSR of the disclosure comprising an IL2RG signal peptide, an IL2RG extracellular domain, an IL2RG transmembrane domain, an IL2RG intracellular domain and a CD3z intracellular domain comprises, consists essentially of, or consists of the amino acid sequence at least 95% identical to the amino acid sequence of SEQ ID NO: 24. The CSR of the disclosure comprising an IL2RG signal peptide, an IL2RG extracellular domain, an IL2RG transmembrane domain, an IL2RG intracellular domain and a CD3z intracellular domain comprises, consists essentially of, or consists of the amino acid sequence at least 99% identical to the amino acid sequence of SEQ ID NO: 24. The CSR of the disclosure comprising an IL2RG signal peptide, an IL2RG extracellular domain, an IL2RG transmembrane domain, an IL2RG intracellular domain and a CD3z intracellular domain comprises, consists essentially of, or consists of the amino acid sequence of SEQ ID NO: 24.

[0094] The CSR of the disclosure comprising a CD2 signal peptide, a mutated or truncated CD2 extracellular domain, an IL2RG transmembrane domain and an IL2RG intracellular domain comprises, consists essentially of, or consists of the amino acid sequence at least 90% identical to the amino acid sequence of SEQ ID NO: 25. The CSR of the disclosure comprising a CD2 signal peptide, a mutated or truncated CD2 extracellular domain, an IL2RG transmembrane domain and an IL2RG intracellular domain comprises, consists essentially of, or consists of the amino acid sequence at least 95% identical to the amino acid sequence of SEQ ID NO: 25. The CSR of the disclosure comprising a CD2 signal peptide, a mutated or truncated CD2 extracellular domain, an IL2RG transmembrane domain and an IL2RG intracellular domain comprises, consists essentially of, or consists of the amino acid sequence at least 99% identical to the amino acid sequence of SEQ ID NO: 25. The CSR of the disclosure comprising a CD2 signal peptide, a mutated or truncated CD2 extracellular domain, an IL2RG transmembrane domain and an IL2RG intracellular domain comprises, consists essentially of, or consists of the amino acid sequence of SEQ ID NO: 25.

[0095] The CSR of the disclosure comprising a CD2 signal peptide, a mutated or truncated CD2 extracellular domain, an IL2RG transmembrane domain, an IL2RG intracellular domain and a CD3z intracellular domain comprises, consists essentially of, or consists of the amino acid sequence at least 90% identical to the amino acid sequence of SEQ ID NO: 26. The CSR of the disclosure comprising a CD2 signal peptide, a mutated or truncated CD2 extracellular domain, an IL2RG transmembrane domain, IL2RG intracellular domain and a CD3z intracellular domain comprises, consists essentially of, or consists of the amino acid sequence at least 95% identical to the amino acid sequence of SEQ ID NO: 26. The CSR of the disclosure comprising a CD2 signal peptide, a mutated or truncated CD2 extracellular domain, an IL2RG transmembrane domain, IL2RG intracellular domain and a CD3z intracellular domain comprises, consists essentially of, or consists of the amino acid sequence at least 99% identical to the amino acid sequence of SEQ ID NO: 26. The CSR of the disclosure comprising a CD2 signal peptide, a mutated or truncated CD2 extracellular domain, an IL2RG transmembrane domain, an IL2RG intracellular domain and a CD3z intracellular domain comprises, consists essentially of, or consists of the amino acid sequence of SEQ ID NO: 26.

[0096] The CSR of the disclosure comprising a CD2 signal peptide, a mutated or truncated CD2 extracellular domain, a CD2 transmembrane domain and an IL2RG intracellular domain comprises, consists essentially of, or consists of the amino acid sequence at least 90% identical to the amino acid sequence of SEQ ID NO: 27. The CSR of the disclosure comprising a CD2 signal peptide, a mutated or truncated CD2 extracellular domain, a CD2 transmembrane domain and an IL2RG intracellular domain comprises, consists essentially of, or consists of the amino acid sequence at least 95% identical to the amino acid sequence of SEQ ID NO: 27. The CSR of the disclosure comprising a CD2 signal peptide, a mutated or truncated CD2 extracellular domain, a CD2 transmembrane domain and an IL2RG intracellular domain comprises, consists essentially of, or consists of the amino acid sequence at least 99% identical to the amino acid sequence of SEQ ID NO: 27. The CSR of the disclosure comprising a CD2 signal peptide, a mutated or truncated CD2 extracellular domain, a CD2 transmembrane domain and an IL2RG intracellular domain comprises, consists essentially of, or consists of the amino acid sequence of SEQ ID NO: 27.

[0097] The CSR of the disclosure comprising a CD2 signal peptide, a mutated or truncated CD2 extracellular domain, a CD2 transmembrane domain, an IL2RG intracellular domain and a CD3z intracellular domain comprises, consists essentially of, or consists of the amino acid sequence at least 90% identical to the amino acid sequence of SEQ ID NO: 28. The CSR of the disclosure comprising a CD2 signal peptide, a mutated or truncated CD2 extracellular domain, a CD2 transmembrane domain, IL2RG intracellular domain and a CD3z intracellular domain comprises, consists essentially of, or consists of the amino acid sequence at least 95% identical to the amino acid sequence of SEQ ID NO: 28. The CSR of the disclosure comprising a CD2 signal peptide, a mutated or truncated CD2 extracellular domain, a CD2 transmembrane domain, IL2RG intracellular domain and a CD3z intracellular domain comprises, consists essentially of, or consists of the amino acid sequence at least 99% identical to the amino acid sequence of SEQ ID NO: 28. The CSR of the disclosure comprising a CD2 signal peptide, a mutated or truncated CD2 extracellular domain, a CD2 transmembrane domain, an IL2RG intracellular domain and a CD3z intracellular domain comprises, consists essentially of, or consists of the amino acid sequence of SEQ ID NO: 28.

[0098] The CSR of the disclosure comprising a CD2 signal peptide, a mutated or truncated CD2 extracellular domain, an IL2RB transmembrane domain, an IL2RB intracellular domain and an IL2RG intracellular domain comprises, consists essentially of, or consists of the amino acid sequence at least 90% identical to the amino acid sequence of SEQ ID NO: 29. The CSR of the disclosure comprising a CD2 signal peptide, a mutated or truncated CD2 extracellular domain, an IL2RB transmembrane domain, an IL2RB intracellular domain and an IL2RG intracellular domain comprises, consists essentially of, or consists of the amino acid sequence at least 95% identical to the amino acid sequence of SEQ ID NO: 29. The CSR of the disclosure comprising a CD2 signal peptide, a mutated or truncated CD2 extracellular domain, an IL2RB transmembrane domain, an IL2RB intracellular domain and an IL2RG intracellular domain comprises, consists essentially of, or consists of the amino acid sequence at least 99% identical to the amino acid sequence of SEQ ID NO: 29. The CSR of the disclosure comprising a CD2 signal peptide, a mutated or truncated CD2 extracellular domain, an IL2RB transmembrane domain, an IL2RB intracellular domain and an IL2RG intracellular domain comprises, consists essentially of, or consists of the amino acid sequence of SEQ ID NO: 29.

[0099] The CSR of the disclosure comprising a CD2 signal peptide, a mutated or truncated CD2 extracellular domain, an IL2RB transmembrane domain, an IL2RB intracellular domain, an IL2RG intracellular domain and a CD3z intracellular domain comprises, consists essentially of, or consists of the amino acid sequence at least 90% identical to the amino acid sequence of SEQ ID NO: 30. The CSR of the disclosure comprising a CD2 signal peptide, a mutated or truncated CD2 extracellular domain, an IL2RB transmembrane domain, an IL2RB intracellular domain, an IL2RG intracellular domain and a CD3z intracellular domain comprises, consists essentially of, or consists of the amino acid sequence at least 95% identical to the amino acid sequence of SEQ ID NO: 30. The CSR of the disclosure comprising a CD2 signal peptide, a mutated or truncated CD2 extracellular domain, an IL2RB transmembrane domain, an IL2RB intracellular domain, an IL2RG intracellular domain and a CD3z intracellular domain comprises, consists essentially of, or consists of the amino acid sequence at least 99% identical to the amino acid sequence of SEQ ID NO: 30. The CSR of the disclosure comprising a CD2 signal peptide, a mutated or truncated CD2 extracellular domain, an IL2RB transmembrane domain, an IL2RB intracellular domain, an IL2RG intracellular domain and a CD3z intracellular domain comprises, consists essentially of, or consists of the amino acid sequence of SEQ ID NO: 30.

[0100] The CSR of the disclosure comprising a CD2 signal peptide, a mutated or truncated CD2 extracellular domain, a CD2 transmembrane domain, an IL2RB intracellular domain and an IL2RG intracellular domain comprises, consists essentially of, or consists of the amino acid sequence at least 90% identical to the amino acid sequence of SEQ ID NO: 31. The CSR of the disclosure comprising a CD2 signal peptide, a mutated or truncated CD2 extracellular domain, a CD2 transmembrane domain, an IL2RB intracellular domain and an IL2RG intracellular domain comprises, consists essentially of, or consists of the amino acid sequence at least 95% identical to the amino acid sequence of SEQ ID NO: 31. The CSR of the disclosure comprising a CD2 signal peptide, a mutated or truncated CD2 extracellular domain, a CD2 transmembrane domain, an IL2RB intracellular domain and an IL2RG intracellular domain comprises, consists essentially of, or consists of the amino acid sequence at least 99% identical to the amino acid sequence of SEQ ID NO: 31. The CSR of the disclosure comprising a CD2 signal peptide, a mutated or truncated CD2 extracellular domain, a CD2 transmembrane domain, an IL2RB intracellular domain and an IL2RG intracellular domain comprises, consists essentially of, or consists of the amino acid sequence of SEQ ID NO: 31.

[0101] The CSR of the disclosure comprising a CD2 signal peptide, a mutated or truncated CD2 extracellular domain, a CD2 transmembrane domain, an IL2RB intracellular domain, an IL2RG intracellular domain and a CD3z intracellular domain comprises, consists essentially of, or consists of the amino acid sequence at least 90% identical to the amino acid sequence of SEQ ID NO: 32. The CSR of the disclosure comprising a CD2 signal peptide, a mutated or truncated CD2 extracellular domain, a CD2 transmembrane domain, an IL2RB intracellular domain, an IL2RG intracellular domain and a CD3z intracellular domain comprises, consists essentially of, or consists of the amino acid sequence at least 95% identical to the amino acid sequence of SEQ ID NO: 32. The CSR of the disclosure comprising a CD2 signal peptide, a mutated or truncated CD2 extracellular domain, a CD2 transmembrane domain, an IL2RB intracellular domain, an IL2RG intracellular domain and a CD3z intracellular domain comprises, consists essentially of, or consists of the amino acid sequence at least 99% identical to the amino acid sequence of SEQ ID NO: 32. The CSR of the disclosure comprising a CD2 signal peptide, a mutated or truncated CD2 extracellular domain, a CD2 transmembrane domain, an IL2RB intracellular domain, an IL2RG intracellular domain and a CD3z intracellular domain comprises, consists essentially of, or consists of the amino acid sequence of SEQ ID NO: 32.

[0102] The CSR of the disclosure comprising a CD2 signal peptide, a mutated or truncated CD2 extracellular domain, an IL2RG transmembrane domain, an IL2RG intracellular domain and an IL2RB intracellular domain comprises, consists essentially of, or consists of the amino acid sequence at least 90% identical to the amino acid sequence of SEQ ID NO: 33. The CSR of the disclosure comprising a CD2 signal peptide, a mutated or truncated CD2 extracellular domain, an IL2RG transmembrane domain, an IL2RG intracellular domain and an IL2RB intracellular domain comprises, consists essentially of, or consists of the amino acid sequence at least 95% identical to the amino acid sequence of SEQ ID NO: 33. The CSR of the disclosure comprising a CD2 signal peptide, a mutated or truncated CD2 extracellular domain, an IL2RG transmembrane domain, an IL2RG intracellular domain and an IL2RB intracellular domain comprises, consists essentially of, or consists of the amino acid sequence at least 99% identical to the amino acid sequence of SEQ ID NO: 33. The CSR of the disclosure comprising a CD2 signal peptide, a mutated or truncated CD2 extracellular domain, an IL2RG transmembrane domain, an IL2RG intracellular domain and an IL2RB intracellular domain comprises, consists essentially of, or consists of the amino acid sequence of SEQ ID NO: 33.

[0103] The CSR of the disclosure comprising a CD2 signal peptide, a mutated or truncated CD2 extracellular domain, an IL2RG transmembrane domain, an IL2RG intracellular domain, an IL2RB intracellular domain and a CD3z intracellular domain comprises, consists essentially of, or consists of the amino acid sequence at least 90% identical to the amino acid sequence of SEQ ID NO: 34. The CSR of the disclosure comprising a CD2 signal peptide, a mutated or truncated CD2 extracellular domain, an IL2RG transmembrane domain, an IL2RG intracellular domain, an IL2RB intracellular domain and a CD3z intracellular domain comprises, consists essentially of, or consists of the amino acid sequence at least 95% identical to the amino acid sequence of SEQ ID NO: 34. The CSR of the disclosure comprising a CD2 signal peptide, a mutated or truncated CD2 extracellular domain, an IL2RG transmembrane domain, an IL2RG intracellular domain, an IL2RB intracellular domain and a CD3z intracellular domain comprises, consists essentially of, or consists of the amino acid sequence at least 99% identical to the amino acid sequence of SEQ ID NO: 34. The CSR of the disclosure comprising a CD2 signal peptide, a mutated or truncated CD2 extracellular domain, an IL2RG transmembrane domain, an IL2RG intracellular domain, an IL2RB intracellular domain and a CD3z intracellular domain comprises, consists essentially of, or consists of the amino acid sequence of SEQ ID NO: 34.

[0104] The CSR of the disclosure comprising a CD2 signal peptide, a mutated or truncated CD2 extracellular domain, a CD2 transmembrane domain, an IL2RG intracellular domain and an IL2RB intracellular domain comprises, consists essentially of, or consists of the amino acid sequence at least 90% identical to the amino acid sequence of SEQ ID NO: 35. The CSR of the disclosure comprising a CD2 signal peptide, a mutated or truncated CD2 extracellular domain, a CD2 transmembrane domain, an IL2RG intracellular domain and an IL2RB intracellular domain comprises, consists essentially of, or consists of the amino acid sequence at least 95% identical to the amino acid sequence of SEQ ID NO: 35. The CSR of the disclosure comprising a CD2 signal peptide, a mutated or truncated CD2 extracellular domain, a CD2 transmembrane domain, an IL2RG intracellular domain and an IL2RB intracellular domain comprises, consists essentially of, or consists of the amino acid sequence at least 99% identical to the amino acid sequence of SEQ ID NO: 35. The CSR of the disclosure comprising a CD2 signal peptide, a mutated or truncated CD2 extracellular domain, a CD2 transmembrane domain, an IL2RG intracellular domain and an IL2RB intracellular domain comprises, consists essentially of, or consists of the amino acid sequence of SEQ ID NO: 35.

[0105] The CSR of the disclosure comprising a CD2 signal peptide, a mutated or truncated CD2 extracellular domain, a CD2 transmembrane domain, an IL2RG intracellular domain, an IL2RB intracellular domain and a CD3z intracellular domain comprises, consists essentially of, or consists of the amino acid sequence at least 90% identical to the amino acid sequence of SEQ ID NO: 36. The CSR of the disclosure comprising a CD2 signal peptide, a mutated or truncated CD2 extracellular domain, a CD2 transmembrane domain, an IL2RG intracellular domain, an IL2RB intracellular domain and a CD3z intracellular domain comprises, consists essentially of, or consists of the amino acid sequence at least 95% identical to the amino acid sequence of SEQ ID NO: 36. The CSR of the disclosure comprising a CD2 signal peptide, a mutated or truncated CD2 extracellular domain, a CD2 transmembrane domain, an IL2RG intracellular domain, an IL2RB intracellular domain and a CD3z intracellular domain comprises, consists essentially of, or consists of the amino acid sequence at least 99% identical to the amino acid sequence of SEQ ID NO: 36. The CSR of the disclosure comprising a CD2 signal peptide, a mutated or truncated CD2 extracellular domain, a CD2 transmembrane domain, an IL2RG intracellular domain, an IL2RB intracellular domain and a CD3z intracellular domain comprises, consists essentially of, or consists of the amino acid sequence of SEQ ID NO: 36.

[0106] The CSR of the disclosure comprising a CD8 signal peptide, a mutated or truncated CD2 extracellular domain, a TNFR2 transmembrane domain, a TNFR2 intracellular domain and a CD3z intracellular domain comprises, consists essentially of, or consists of the amino acid sequence at least 90% identical to the amino acid sequence of SEQ ID NO: 37. The CSR of the disclosure comprising a CD8 signal peptide, a mutated or truncated CD2 extracellular domain, a TNFR2 transmembrane domain, a TNFR2 intracellular domain and a CD3z intracellular domain comprises, consists essentially of, or consists of the amino acid sequence at least 95% identical to the amino acid sequence of SEQ ID NO: 37. The CSR of the disclosure comprising a CD8 signal peptide, a mutated or truncated CD2 extracellular domain, a TNFR2 transmembrane domain, a TNFR2 intracellular domain and a CD3z intracellular domain comprises, consists essentially of, or consists of the amino acid sequence at least 99% identical to the amino acid sequence of SEQ ID NO: 37. The CSR of the disclosure comprising a CD8 signal peptide, a mutated or truncated CD2 extracellular domain, a TNFR2 transmembrane domain, a TNFR2 intracellular domain and a CD3z intracellular domain comprises, consists essentially of, or consists of the amino acid sequence of SEQ ID NO: 37.

[0107] The CSR of the disclosure comprising a CD8 signal peptide, a mutated or truncated CD2 extracellular domain, a CD2 transmembrane domain, a TNFR2 intracellular domain and a CD3z intracellular domain comprises, consists essentially of, or consists of the amino acid sequence at least 90% identical to the amino acid sequence of SEQ ID NO: 38. The CSR of the disclosure comprising a CD8 signal peptide, a mutated or truncated CD2 extracellular domain, a CD2 transmembrane domain, a TNFR2 intracellular domain and a CD3z intracellular domain comprises, consists essentially of, or consists of the amino acid sequence at least 95% identical to the amino acid sequence of SEQ ID NO: 38. The CSR of the disclosure comprising a CD8 signal peptide, a mutated or truncated CD2 extracellular domain, a CD2 transmembrane domain, a TNFR2 intracellular domain and a CD3z intracellular domain comprises, consists essentially of, or consists of the amino acid sequence at least 99% identical to the amino acid sequence of SEQ ID NO: 38. The CSR of the disclosure comprising a CD8 signal peptide, a mutated or truncated CD2 extracellular domain, a CD2 transmembrane domain, a TNFR2 intracellular domain and a CD3z intracellular domain comprises, consists essentially of, or consists of the amino acid sequence of SEQ ID NO: 38.

[0108] The CSR of the disclosure comprising a CD8a signal peptide, an IL2RB extracellular domain, an IL2RB transmembrane domain and an IL2RB intracellular domain comprises, consists essentially of, or consists of the amino acid sequence at least 90% identical to the amino acid sequence of SEQ ID NO: 39. The CSR of the disclosure comprising a CD8a signal peptide, an IL2RB extracellular domain, an IL2RB transmembrane domain and an IL2RB intracellular domain comprises, consists essentially of, or consists of the amino acid sequence at least 95% identical to the amino acid sequence of SEQ ID NO: 39. The CSR of the disclosure comprising a CD8a signal peptide, an IL2RB extracellular domain, an IL2RB transmembrane domain and an IL2RB intracellular domain comprises, consists essentially of, or consists of the amino acid sequence at least 99% identical to the amino acid sequence of SEQ ID NO: 39. The CSR of the disclosure comprising a CD8a signal peptide, an IL2RB extracellular domain, an IL2RB transmembrane domain and an IL2RB intracellular domain comprises, consists essentially of, or consists of the amino acid sequence of SEQ ID NO: 39.

[0109] The CSR of the disclosure comprising a CD8a signal peptide, an IL2RB extracellular domain, an IL2RB transmembrane domain, an IL2RB intracellular domain and a CD3z intracellular domain comprises, consists essentially of, or consists of the amino acid sequence at least 90% identical to the amino acid sequence of SEQ ID NO: 40. The CSR of the disclosure comprising a CD8a signal peptide, an IL2RB extracellular domain, an IL2RB transmembrane domain, an IL2RB intracellular domain and a CD3z intracellular domain comprises, consists essentially of, or consists of the amino acid sequence at least 95% identical to the amino acid sequence of SEQ ID NO: 40. The CSR of the disclosure comprising a CD8a signal peptide, an IL2RB extracellular domain, an IL2RB transmembrane domain, an IL2RB intracellular domain and a CD3z intracellular domain comprises, consists essentially of, or consists of the amino acid sequence at least 99% identical to the amino acid sequence of SEQ ID NO: 40. The CSR of the disclosure comprising a CD8a signal peptide, an IL2RB extracellular domain, an IL2RB transmembrane domain, an IL2RB intracellular domain and a CD3z intracellular domain comprises, consists essentially of, or consists of the amino acid sequence of SEQ ID NO: 40.

[0110] The CSR of the disclosure comprising a CD8a signal peptide, a mutated or truncated CD2 extracellular domain, an IL2RB transmembrane domain and an IL2RB intracellular domain comprises, consists essentially of, or consists of the amino acid sequence at least 90% identical to the amino acid sequence of SEQ ID NO: 41. The CSR of the disclosure comprising a CD8a signal peptide, a mutated or truncated CD2 extracellular domain, an IL2RB transmembrane domain and an IL2RB intracellular domain comprises, consists essentially of, or consists of the amino acid sequence at least 95% identical to the amino acid sequence of SEQ ID NO: 41. The CSR of the disclosure comprising a CD8a signal peptide, a mutated or truncated CD2 extracellular domain, an IL2RB transmembrane domain and an IL2RB intracellular domain comprises, consists essentially of, or consists of the amino acid sequence at least 99% identical to the amino acid sequence of SEQ ID NO: 41. The CSR of the disclosure comprising a CD8a signal peptide, a mutated or truncated CD2 extracellular domain, an IL2RB transmembrane domain and an IL2RB intracellular domain comprises, consists essentially of, or consists of the amino acid sequence of SEQ ID NO: 41.

[0111] The CSR of the disclosure comprising a CD8a signal peptide, a mutated or truncated CD2 extracellular domain, an IL2RB transmembrane domain, an IL2RB intracellular domain and a CD3z intracellular domain comprises, consists essentially of, or consists of the amino acid sequence at least 90% identical to the amino acid sequence of SEQ ID NO: 42. The CSR of the disclosure comprising a CD8a signal peptide, a mutated or truncated CD2 extracellular domain, an IL2RB transmembrane domain, an IL2RB intracellular domain and a CD3z intracellular domain comprises, consists essentially of, or consists of the amino acid sequence at least 95% identical to the amino acid sequence of SEQ ID NO: 42. The CSR of the disclosure comprising a CD8a signal peptide, a mutated or truncated CD2 extracellular domain, an IL2RB transmembrane domain, an IL2RB intracellular domain and a CD3z intracellular domain comprises, consists essentially of, or consists of the amino acid sequence at least 99% identical to the amino acid sequence of SEQ ID NO: 42. The CSR of the disclosure comprising a CD8a signal peptide, a mutated or truncated CD2 extracellular domain, an IL2RB transmembrane domain, an IL2RB intracellular domain and a CD3z intracellular domain comprises, consists essentially of, or consists of the amino acid sequence of SEQ ID NO: 42.

[0112] The CSR of the disclosure comprising a CD8a signal peptide, a mutated or truncated CD2 extracellular domain, a CD2 transmembrane domain and an IL2RB intracellular domain comprises, consists essentially of, or consists of the amino acid sequence at least 90% identical to the amino acid sequence of SEQ ID NO: 43. The CSR of the disclosure comprising a CD8a signal peptide, a mutated or truncated CD2 extracellular domain, a CD2 transmembrane domain and an IL2RB intracellular domain comprises, consists essentially of, or consists of the amino acid sequence at least 95% identical to the amino acid sequence of SEQ ID NO: 43. The CSR of the disclosure comprising a CD8a signal peptide, a mutated or truncated CD2 extracellular domain, a CD2 transmembrane domain and an IL2RB intracellular domain comprises, consists essentially of, or consists of the amino acid sequence at least 99% identical to the amino acid sequence of SEQ ID NO: 43. The CSR of the disclosure comprising a CD8a signal peptide, a mutated or truncated CD2 extracellular domain, a CD2 transmembrane domain and an IL2RB intracellular domain comprises, consists essentially of, or consists of the amino acid sequence of SEQ ID NO: 43.

[0113] The CSR of the disclosure comprising a CD8a signal peptide, a mutated or truncated CD2 extracellular domain, a CD2 transmembrane domain, an IL2RB intracellular domain and a CD3z intracellular domain comprises, consists essentially of, or consists of the amino acid sequence at least 90% identical to the amino acid sequence of SEQ ID NO: 44. The CSR of the disclosure comprising a CD8a signal peptide, a mutated or truncated CD2 extracellular domain, a CD2 transmembrane domain, an IL2RB intracellular domain and a CD3z intracellular domain comprises, consists essentially of, or consists of the amino acid sequence at least 95% identical to the amino acid sequence of SEQ ID NO: 44. The CSR of the disclosure comprising a CD8a signal peptide, a mutated or truncated CD2 extracellular domain, a CD2 transmembrane domain, an IL2RB intracellular domain and a CD3z intracellular domain comprises, consists essentially of, or consists of the amino acid sequence at least 99% identical to the amino acid sequence of SEQ ID NO: 44. The CSR of the disclosure comprising a CD8a signal peptide, a mutated or truncated CD2 extracellular domain, a CD2 transmembrane domain, an IL2RB intracellular domain and a CD3z intracellular domain comprises, consists essentially of, or consists of the amino acid sequence of SEQ ID NO: 44.

[0114] The CSR of the disclosure comprising a CD8a signal peptide, an IL2RG extracellular domain, an IL2RG transmembrane domain and an IL2RG intracellular domain comprises, consists essentially of, or consists of the amino acid sequence at least 90% identical to the amino acid sequence of SEQ ID NO: 45. The CSR of the disclosure comprising a CD8a signal peptide, an IL2RG extracellular domain, an IL2RG transmembrane domain and an IL2RG intracellular domain comprises, consists essentially of, or consists of the amino acid sequence at least 95% identical to the amino acid sequence of SEQ ID NO: 45. The CSR of the disclosure comprising a CD8a signal peptide, an IL2RG extracellular domain, an IL2RG transmembrane domain and an IL2RG intracellular domain comprises, consists essentially of, or consists of the amino acid sequence at least 99% identical to the amino acid sequence of SEQ ID NO: 45. The CSR of the disclosure comprising a CD8a signal peptide, an IL2RG extracellular domain, an IL2RG transmembrane domain and an IL2RG intracellular domain comprises, consists essentially of, or consists of the amino acid sequence of SEQ ID NO: 45.

[0115] The CSR of the disclosure comprising a CD8a signal peptide, an IL2RG extracellular domain, an IL2RG transmembrane domain, an IL2RG intracellular domain and a CD3z intracellular domain comprises, consists essentially of, or consists of the amino acid sequence at least 90% identical to the amino acid sequence of SEQ ID NO: 46. The CSR of the disclosure comprising a CD8a signal peptide, an IL2RG extracellular domain, an IL2RG transmembrane domain, an IL2RG intracellular domain and a CD3z intracellular domain comprises, consists essentially of, or consists of the amino acid sequence at least 95% identical to the amino acid sequence of SEQ ID NO: 46. The CSR of the disclosure comprising a CD8a signal peptide, an IL2RG extracellular domain, an IL2RG transmembrane domain, an IL2RG intracellular domain and a CD3z intracellular domain comprises, consists essentially of, or consists of the amino acid sequence at least 99% identical to the amino acid sequence of SEQ ID NO: 46. The CSR of the disclosure comprising a CD8a signal peptide, an IL2RG extracellular domain, an IL2RG transmembrane domain, an IL2RG intracellular domain and a CD3z intracellular domain comprises, consists essentially of, or consists of the amino acid sequence of SEQ ID NO: 46.

[0116] The CSR of the disclosure comprising a CD8a signal peptide, a mutated or truncated CD2 extracellular domain, an IL2RG transmembrane domain and an IL2RG intracellular domain comprises, consists essentially of, or consists of the amino acid sequence at least 90% identical to the amino acid sequence of SEQ ID NO: 47. The CSR of the disclosure comprising a CD8a signal peptide, a mutated or truncated CD2 extracellular domain, an IL2RG transmembrane domain and an IL2RG intracellular domain comprises, consists essentially of, or consists of the amino acid sequence at least 95% identical to the amino acid sequence of SEQ ID NO: 47. The CSR of the disclosure comprising a CD8a signal peptide, a mutated or truncated CD2 extracellular domain, an IL2RG transmembrane domain and an IL2RG intracellular domain comprises, consists essentially of, or consists of the amino acid sequence at least 99% identical to the amino acid sequence of SEQ ID NO: 47. The CSR of the disclosure comprising a CD8a signal peptide, a mutated or truncated CD2 extracellular domain, an IL2RG transmembrane domain and an IL2RG intracellular domain comprises, consists essentially of, or consists of the amino acid sequence of SEQ ID NO: 47.

[0117] The CSR of the disclosure comprising a CD8a signal peptide, a mutated or truncated CD2 extracellular domain, an IL2RG transmembrane domain, an IL2RG intracellular domain and a CD3z intracellular domain comprises, consists essentially of, or consists of the amino acid sequence at least 90% identical to the amino acid sequence of SEQ ID NO: 48. The CSR of the disclosure comprising a CD8a signal peptide, a mutated or truncated CD2 extracellular domain, an IL2RG transmembrane domain, an IL2RG intracellular domain and a CD3z intracellular domain comprises, consists essentially of, or consists of the amino acid sequence at least 95% identical to the amino acid sequence of SEQ ID NO: 48. The CSR of the disclosure comprising a CD8a signal peptide, a mutated or truncated CD2 extracellular domain, an IL2RG transmembrane domain, an IL2RG intracellular domain and a CD3z intracellular domain comprises, consists essentially of, or consists of the amino acid sequence at least 99% identical to the amino acid sequence of SEQ ID NO: 48. The CSR of the disclosure comprising a CD8a signal peptide, a mutated or truncated CD2 extracellular domain, an IL2RG transmembrane domain, an IL2RG intracellular domain and a CD3z intracellular domain comprises, consists essentially of, or consists of the amino acid sequence of SEQ ID NO: 48.

[0118] The CSR of the disclosure comprising a CD8a signal peptide, a mutated or truncated CD2 extracellular domain, a CD2 transmembrane domain and an IL2RG intracellular domain comprises, consists essentially of, or consists of the amino acid sequence at least 90% identical to the amino acid sequence of SEQ ID NO: 49. The CSR of the disclosure comprising a CD8a signal peptide, a mutated or truncated CD2 extracellular domain, a CD2 transmembrane domain and an IL2RG intracellular domain comprises, consists essentially of, or consists of the amino acid sequence at least 95% identical to the amino acid sequence of SEQ ID NO: 49. The CSR of the disclosure comprising a CD8a signal peptide, a mutated or truncated CD2 extracellular domain, a CD2 transmembrane domain and an IL2RG intracellular domain comprises, consists essentially of, or consists of the amino acid sequence at least 99% identical to the amino acid sequence of SEQ ID NO: 49. The CSR of the disclosure comprising a CD8a signal peptide, a mutated or truncated CD2 extracellular domain, a CD2 transmembrane domain and an IL2RG intracellular domain comprises, consists essentially of, or consists of the amino acid sequence of SEQ ID NO: 49.

[0119] The CSR of the disclosure comprising a CD8a signal peptide, a mutated or truncated CD2 extracellular domain, a CD2 transmembrane domain, an IL2RG intracellular domain and a CD3z intracellular domain comprises, consists essentially of, or consists of the amino acid sequence at least 90% identical to the amino acid sequence of SEQ ID NO: 50. The CSR of the disclosure comprising a CD8a signal peptide, a mutated or truncated CD2 extracellular domain, a CD2 transmembrane domain, an IL2RG intracellular domain and a CD3z intracellular domain comprises, consists essentially of, or consists of the amino acid sequence at least 95% identical to the amino acid sequence of SEQ ID NO: 50. The CSR of the disclosure comprising a CD8a signal peptide, a mutated or truncated CD2 extracellular domain, a CD2 transmembrane domain, an IL2RG intracellular domain and a CD3z intracellular domain comprises, consists essentially of, or consists of the amino acid sequence at least 99% identical to the amino acid sequence of SEQ ID NO: 50. The CSR of the disclosure comprising a CD8a signal peptide, a mutated or truncated CD2 extracellular domain, a CD2 transmembrane domain, an IL2RG intracellular domain and a CD3z intracellular domain comprises, consists essentially of, or consists of the amino acid sequence of SEQ ID NO: 50.

[0120] The CSR of the disclosure comprising a CD8a signal peptide, a mutated or truncated CD2 extracellular domain, an IL2RB transmembrane domain, an IL2RB intracellular domain and an IL2RG intracellular domain comprises, consists essentially of, or consists of the amino acid sequence at least 90% identical to the amino acid sequence of SEQ ID NO: 51. The CSR of the disclosure comprising a CD8a signal peptide, a mutated or truncated CD2 extracellular domain, an IL2RB transmembrane domain, an IL2RB intracellular domain and an IL2RG intracellular domain comprises, consists essentially of, or consists of the amino acid sequence at least 95% identical to the amino acid sequence of SEQ ID NO: 51. The CSR of the disclosure comprising a CD8a signal peptide, a mutated or truncated CD2 extracellular domain, an IL2RB transmembrane domain, an IL2RB intracellular domain and an IL2RG intracellular domain comprises, consists essentially of, or consists of the amino acid sequence at least 99% identical to the amino acid sequence of SEQ ID NO: 51. The CSR of the disclosure comprising a CD8a signal peptide, a mutated or truncated CD2 extracellular domain, an IL2RB transmembrane domain, an IL2RB intracellular domain and an IL2RG intracellular domain comprises, consists essentially of, or consists of the amino acid sequence of SEQ ID NO: 51.

[0121] The CSR of the disclosure comprising a CD8a signal peptide, a mutated or truncated CD2 extracellular domain, an IL2RB transmembrane domain, an IL2RB intracellular domain, an IL2RG intracellular domain and a CD3z intracellular domain comprises, consists essentially of, or consists of the amino acid sequence at least 90% identical to the amino acid sequence of SEQ ID NO: 52. The CSR of the disclosure comprising a CD8a signal peptide, a mutated or truncated CD2 extracellular domain, an IL2RB transmembrane domain, an IL2RB intracellular domain, an IL2RG intracellular domain and a CD3z intracellular domain comprises, consists essentially of, or consists of the amino acid sequence at least 95% identical to the amino acid sequence of SEQ ID NO: 52. The CSR of the disclosure comprising a CD8a signal peptide, a mutated or truncated CD2 extracellular domain, an IL2RB transmembrane domain, an IL2RB intracellular domain, an IL2RG intracellular domain and a CD3z intracellular domain comprises, consists essentially of, or consists of the amino acid sequence at least 99% identical to the amino acid sequence of SEQ ID NO: 52. The CSR of the disclosure comprising a CD8a signal peptide, a mutated or truncated CD2 extracellular domain, an IL2RB transmembrane domain, an IL2RB intracellular domain, an IL2RG intracellular domain and a CD3z intracellular domain comprises, consists essentially of, or consists of the amino acid sequence of SEQ ID NO: 52.

[0122] The CSR of the disclosure comprising a CD8a signal peptide, a mutated or truncated CD2 extracellular domain, a CD2 transmembrane domain, an IL2RB intracellular domain and an IL2RG intracellular domain comprises, consists essentially of, or consists of the amino acid sequence at least 90% identical to the amino acid sequence of SEQ ID NO: 53. The CSR of the disclosure comprising a CD8a signal peptide, a mutated or truncated CD2 extracellular domain, a CD2 transmembrane domain, an IL2RB intracellular domain and an IL2RG intracellular domain comprises, consists essentially of, or consists of the amino acid sequence at least 95% identical to the amino acid sequence of SEQ ID NO: 53. The CSR of the disclosure comprising a CD8a signal peptide, a mutated or truncated CD2 extracellular domain, a CD2 transmembrane domain, an IL2RB intracellular domain and an IL2RG intracellular domain comprises, consists essentially of, or consists of the amino acid sequence at least 99% identical to the amino acid sequence of SEQ ID NO: 53. The CSR of the disclosure comprising a CD8a signal peptide, a mutated or truncated CD2 extracellular domain, a CD2 transmembrane domain, an IL2RB intracellular domain and an IL2RG intracellular domain comprises, consists essentially of, or consists of the amino acid sequence of SEQ ID NO: 53.

[0123] The CSR of the disclosure comprising a CD8a signal peptide, a mutated or truncated CD2 extracellular domain, a CD2 transmembrane domain, an IL2RB intracellular domain, an IL2RG intracellular domain and a CD3z intracellular domain comprises, consists essentially of, or consists of the amino acid sequence at least 90% identical to the amino acid sequence of SEQ ID NO: 54. The CSR of the disclosure comprising a CD8a signal peptide, a mutated or truncated CD2 extracellular domain, a CD2 transmembrane domain, an IL2RB intracellular domain, an IL2RG intracellular domain and a CD3z intracellular domain comprises, consists essentially of, or consists of the amino acid sequence at least 95% identical to the amino acid sequence of SEQ ID NO: 54. The CSR of the disclosure comprising a CD8a signal peptide, a mutated or truncated CD2 extracellular domain, a CD2 transmembrane domain, an IL2RB intracellular domain, an IL2RG intracellular domain and a CD3z intracellular domain comprises, consists essentially of, or consists of the amino acid sequence at least 99% identical to the amino acid sequence of SEQ ID NO: 54. The CSR of the disclosure comprising a CD8a signal peptide, a mutated or truncated CD2 extracellular domain, a CD2 transmembrane domain, an IL2RB intracellular domain, an IL2RG intracellular domain and a CD3z intracellular domain comprises, consists essentially of, or consists of the amino acid sequence of SEQ ID NO: 54.

[0124] The CSR of the disclosure comprising a CD8a signal peptide, a mutated or truncated CD2 extracellular domain, an IL2RG transmembrane domain, an IL2RG intracellular domain and an IL2RB intracellular domain comprises, consists essentially of, or consists of the amino acid sequence at least 90% identical to the amino acid sequence of SEQ ID NO: 55. The CSR of the disclosure comprising a CD8a signal peptide, a mutated or truncated CD2 extracellular domain, an IL2RG transmembrane domain, an IL2RG intracellular domain and an IL2RB intracellular domain comprises, consists essentially of, or consists of the amino acid sequence at least 95% identical to the amino acid sequence of SEQ ID NO: 55. The CSR of the disclosure comprising a CD8a signal peptide, a mutated or truncated CD2 extracellular domain, an IL2RG transmembrane domain, an IL2RG intracellular domain and an IL2RB intracellular domain comprises, consists essentially of, or consists of the amino acid sequence at least 99% identical to the amino acid sequence of SEQ ID NO: 55. The CSR of the disclosure comprising a CD8a signal peptide, a mutated or truncated CD2 extracellular domain, an IL2RG transmembrane domain, an IL2RG intracellular domain and an IL2RB intracellular domain comprises, consists essentially of, or consists of the amino acid sequence of SEQ ID NO: 55.

[0125] The CSR of the disclosure comprising a CD8a signal peptide, a mutated or truncated CD2 extracellular domain, an IL2RG transmembrane domain, an IL2RG intracellular domain, an IL2RB intracellular domain and a CD3z intracellular domain comprises, consists essentially of, or consists of the amino acid sequence at least 90% identical to the amino acid sequence of SEQ ID NO: 56. The CSR of the disclosure comprising a CD8a signal peptide, a mutated or truncated CD2 extracellular domain, an IL2RG transmembrane domain, an IL2RG intracellular domain, an IL2RB intracellular domain and a CD3z intracellular domain comprises, consists essentially of, or consists of the amino acid sequence at least 95% identical to the amino acid sequence of SEQ ID NO: 56. The CSR of the disclosure comprising a CD8a signal peptide, a mutated or truncated CD2 extracellular domain, an IL2RG transmembrane domain, an IL2RG intracellular domain, an IL2RB intracellular domain and a CD3z intracellular domain comprises, consists essentially of, or consists of the amino acid sequence at least 99% identical to the amino acid sequence of SEQ ID NO: 56. The CSR of the disclosure comprising a CD8a signal peptide, a mutated or truncated CD2 extracellular domain, an IL2RG transmembrane domain, an IL2RG intracellular domain, an IL2RB intracellular domain and a CD3z intracellular domain comprises, consists essentially of, or consists of the amino acid sequence of SEQ ID NO: 56.

[0126] The CSR of the disclosure comprising a CD8a signal peptide, a mutated or truncated CD2 extracellular domain, a CD2 transmembrane domain, an IL2RG intracellular domain and an IL2RB intracellular domain comprises, consists essentially of, or consists of the amino acid sequence at least 90% identical to the amino acid sequence of SEQ ID NO: 57. The CSR of the disclosure comprising a CD8a signal peptide, a mutated or truncated CD2 extracellular domain, a CD2 transmembrane domain, an IL2RG intracellular domain and an IL2RB intracellular domain comprises, consists essentially of, or consists of the amino acid sequence at least 95% identical to the amino acid sequence of SEQ ID NO: 57. The CSR of the disclosure comprising a CD8a signal peptide, a mutated or truncated CD2 extracellular domain, a CD2 transmembrane domain, an IL2RG intracellular domain and an IL2RB intracellular domain comprises, consists essentially of, or consists of the amino acid sequence at least 99% identical to the amino acid sequence of SEQ ID NO: 57. The CSR of the disclosure comprising a CD8a signal peptide, a mutated or truncated CD2 extracellular domain, a CD2 transmembrane domain, an IL2RG intracellular domain and an IL2RB intracellular domain comprises, consists essentially of, or consists of the amino acid sequence of SEQ ID NO: 57.

[0127] The CSR of the disclosure comprising a CD8a signal peptide, a mutated or truncated CD2 extracellular domain, a CD2 transmembrane domain, an IL2RG intracellular domain, an IL2RB intracellular domain and a CD3z intracellular domain comprises, consists essentially of, or consists of the amino acid sequence at least 90% identical to the amino acid sequence of SEQ ID NO: 58. The CSR of the disclosure comprising a CD8a signal peptide, a mutated or truncated CD2 extracellular domain, a CD2 transmembrane domain,an IL2RG intracellular domain, an IL2RB intracellular domain and a CD3z intracellular domain comprises, consists essentially of, or consists of the amino acid sequence at least 95% identical to the amino acid sequence of SEQ ID NO: 58. The CSR of the disclosure comprising a CD8a signal peptide, a mutated or truncated CD2 extracellular domain, a CD2 transmembrane domain, an IL2RG intracellular domain, an IL2RB intracellular domain and a CD3z intracellular domain comprises, consists essentially of, or consists of the amino acid sequence at least 99% identical to the amino acid sequence of SEQ ID NO: 58. The CSR of the disclosure comprising a CD8a signal peptide, a mutated or truncated CD2 extracellular domain, a CD2 transmembrane domain, an IL2RG intracellular domain, an IL2RB intracellular domain and a CD3z intracellular domain comprises, consists essentially of, or consists of the amino acid sequence of SEQ ID NO: 58.

[0128] In some aspects, the activation component of the CSR of the present disclosure does not bind or is incapable of binding a naturally-occurring molecule. In some aspects, the activation component of the CSR of the present disclosure binds or is capable of binding a naturally-occurring molecule and the CSR transduces a signal upon binding of the activation component to the naturally-occurring molecule. In other aspects, the activation component of the CSR of the present disclosure can bind a naturally-occurring molecule but the CSR does not transduce a signal upon binding of the activation component to a naturally-occurring molecule. In preferred aspects, the activation component of the CSR of the present disclosure binds or is capable of binding to a non-naturally occurring molecule. The activation component of the CSR of the present disclosure selectively transduces a signal upon binding of a non-naturally occurring molecule to the activation component. In one aspect, the naturally occurring molecule is a naturally occurring agonist/activating agent for the activation component of the CSR. The naturally occurring agonist/activating agent that can bind a CSR activation component can be any naturally occurring antibody, antibody fragment or any other binding peptide that is specific to the CSR activation component. The naturally occurring antibody or antibody fragment can be a naturally occurring anti-CD3 antibody or fragment thereof, an anti-CD2 antibody or fragment thereof, an anti-CD28 antibody or fragment thereof, or any combination thereof. In some aspects, the naturally occurring agonist/activating agent that can bind a CSR activation component can be one or more of an anti-human CD3 monospecific tetrameric antibody complex, an anti-human CD2 monospecific tetrameric antibody complex, an anti-human CD28 monospecific tetrameric antibody complex, or a combination thereof. In one aspect, the non-naturally occurring molecule is a non-naturally occurring agonist/activating agent for the activation component of the CSR. The non-naturally occurring agonist/activating agent that can bind a CSR activation component can be any non-naturally occurring antibody or antibody fragment. The non-naturally occurring antibody or antibody fragment can be a non-naturally occurring anti-CD3 antibody or fragment thereof, an anti-CD2 antibody or fragment thereof, an anti-CD28 antibody or fragment thereof, or any combination thereof. In some aspects, the non-naturally occurring agonist/activating agent that can bind a CSR activation component can be one or more of an anti-human CD3 monospecific tetrameric antibody complex, an anti-human CD2 monospecific tetrameric antibody complex, an anti-human CD28 monospecific tetrameric antibody complex, or a combination thereof. In some aspects, the non-naturally occurring agonist/activating agent that can bind a CSR activation component can be selected from the group consisting of anti-CD2 monoclonal antibody, BTI-322 (Przepiorka et al., Blood 92(11):4066-4071, 1998) and humanized anti-CD2 monoclonal antibody clone AFC-TAB-104 (Siplizumab)(Bissonnette et al. Arch. Dermatol. Res. 301(6):429-442, 2009). Other antibody clones include but are not limited to TS1/8, RPA-2.10, 127, 1E7E8.G4, 3.22, 3A10B2, 3F3, 3H667, 4E4, 5F8, 5H3, 6B2D3F12, 6G4, 7H196, 9-1, 9.6, 9D1, 13H78, AB75, AFBD-3, AHC0031, B-E2, B4-D1, BH1, CB.219, DFA-7, E17-P, G11, G531.1, hCD2, H22, IHC531, LT2, LFA2/600, MEM-65, MT110, MT910, MU3, OKT11, OKT12, OTI2C3, OTI3E11, OX-34, REA972, S5.5, T6.3, TP1/31, TS2/9, TS2/18, UMCD2, UMCD2/1E7E8, YTH655.

[0129] The present disclosure also provides a non-naturally occurring chimeric stimulatory receptor (CSR) comprising, consisting essential of, or consisting of: (a) an ectodomain comprising a activation component, wherein the activation component is isolated or derived from a first protein and wherein the activation component binds to a non-naturally occurring molecule but does not bind a naturally-occurring molecule; (b) a transmembrane domain; and (c) at least one intracellular domain, wherein the at least one intracellular signaling domain is isolated or derived from a second protein; wherein the first protein and the second protein are not identical.

[0130] The present disclosure also provides a non-naturally occurring chimeric stimulatory receptor (CSR) comprising, consisting essential of, or consisting of: (a) an ectodomain comprising a activation component, wherein the activation component is isolated or derived from a first protein; (b) a transmembrane domain; and (c) at least one intracellular domain, wherein the at least one intracellular signaling domain is isolated or derived from a second protein; wherein the first protein and the second protein are not identical and wherein the CSR does not transduce a signal upon binding of a naturally-occurring molecule to the activation component.

[0131] The present disclosure also provides a non-naturally occurring chimeric stimulatory receptor (CSR) comprising, consisting essential of, or consisting of: (a) an ectodomain comprising a activation component, wherein the activation component is isolated or derived from a first protein; (b) a transmembrane domain; and (c) at least one intracellular domain, wherein the at least one intracellular signaling domain is isolated or derived from a second protein; wherein the first protein and the second protein are not identical and wherein the CSR transduces a signal upon binding of a non-naturally-occurring molecule to the activation component.

[0132] The present disclosure further provides a non-naturally occurring chimeric stimulatory receptor (CSR) comprising, consisting essential of, or consisting of: (a) an ectodomain comprising a signal peptide and an activation component, wherein the signal peptide comprises a CD2 signal peptide or a portion thereof and wherein the activation component comprises a mutation or truncation of a wild-type CD2 extracellular domain or a portion thereof to which an agonist binds; (b) a transmembrane domain, wherein the transmembrane domain comprises a TNFR2 transmembrane domain or a portion thereof; and (c) an intracellular domain, wherein the intracellular domain comprises a TNFR2 intracellular domain or a portion thereof and a CD3ζ protein or a portion thereof. In one aspect, the mutation or truncation of the CD2 extracellular domain reduces or eliminates binding with naturally occurring CD58. In another aspect, the mutated or truncated CD2 extracellular domain binds anti-CD2 activating agonists and anti-CD2 activating molecules but does not bind naturally occurring CD58.

[0133] The present disclosure further provides a non-naturally occurring chimeric stimulatory receptor (CSR) comprising, consisting essentially of, or consisting of: (a) an ectodomain comprising a signal peptide comprising the amino acid sequence of SEQ ID NO: 9 and a activation component comprising the amino acid sequence of SEQ ID NO: 4; (b) a transmembrane domain of SEQ ID NO: 13; and (c) an intracellular domain comprising the amino acid sequence of SEQ ID NO: 6 and comprising the amino acid sequence of SEQ ID NO: 5. The non-naturally occurring chimeric stimulatory receptor (CSR) can comprise, consist essentially of, or consist of an amino acid sequence at least 80% identical to SEQ ID NO: 17. The non-naturally occurring chimeric stimulatory receptor (CSR) can comprise, consist essentially of, or consist of an amino acid sequence at least 85% identical to SEQ ID NO: 17. The non-naturally occurring chimeric stimulatory receptor (CSR) can comprise, consist essentially of, or consist of an amino acid sequence at least 90% identical to SEQ ID NO: 17. The non-naturally occurring chimeric stimulatory receptor (CSR) can comprise, consist essentially of, or consist of an acid sequence at least 95% identical to SEQ ID NO: 17. The non-naturally occurring chimeric stimulatory receptor (CSR) can comprise, consist essentially of, or consist of an acid sequence at least 99% identical to SEQ ID NO: 17. The non-naturally occurring chimeric stimulatory receptor (CSR) can comprise, consist essentially of, or consist of an amino acid sequence of SEQ ID NO: 17.

[0134] The present disclosure further provides a non-naturally occurring chimeric stimulatory receptor (CSR) comprising, consisting essential of, or consisting of: (a) an ectodomain comprising a signal peptide and an activation component, wherein the signal peptide comprises a CD2 signal peptide or a portion thereof and wherein the activation component comprises a mutation or truncation of a wild-type CD2 extracellular domain or a portion thereof to which an agonist binds; (b) a transmembrane domain, wherein the transmembrane domain comprises a CD2 transmembrane domain or a portion thereof; and (c) an intracellular domain, wherein the intracellular domain comprises a TNFR2 intracellular domain or a portion thereof and a CD3ζ protein or a portion thereof. In one aspect, the mutation or truncation of the CD2 extracellular domain reduces or eliminates binding with naturally occurring CD58. In another aspect, the mutated or truncated CD2 extracellular domain binds anti-CD2 activating agonists and anti-CD2 activating molecules but does not bind naturally occurring CD58.

[0135] The present disclosure further provides a non-naturally occurring chimeric stimulatory receptor (CSR) comprising, consisting essentially of, or consisting of: (a) an ectodomain comprising a signal peptide comprising the amino acid sequence of SEQ ID NO: 9 and a activation component comprising the amino acid sequence of SEQ ID NO: 4; (b) a transmembrane domain of SEQ ID NO: 14; and (c) an intracellular domain comprising the amino acid sequence of SEQ ID NO: 6 and comprising the amino acid sequence of SEQ ID NO: 5. The non-naturally occurring chimeric stimulatory receptor (CSR) can comprise, consist essentially of, or consist of an amino acid sequence at least 80% identical to SEQ ID NO: 18. The non-naturally occurring chimeric stimulatory receptor (CSR) can comprise, consist essentially of, or consist of an amino acid sequence at least 85% identical to SEQ ID NO: 18. The non-naturally occurring chimeric stimulatory receptor (CSR) can comprise, consist essentially of, or consist of an amino acid sequence at least 90% identical to SEQ ID NO: 18. The non-naturally occurring chimeric stimulatory receptor (CSR) can comprise, consist essentially of, or consist of an amino acid sequence at least 95% identical to SEQ ID NO: 18. The non-naturally occurring chimeric stimulatory receptor (CSR) can comprise, consist essentially of, or consist of an amino acid sequence at least 99% identical to SEQ ID NO: 18. The non-naturally occurring chimeric stimulatory receptor (CSR) can comprise, consist essentially of, or consist of an amino acid sequence of SEQ ID NO: 18.

[0136] The present disclosure also provides a nucleic acid sequence encoding an amino acid sequence of any chimeric stimulatory receptor (CSR) disclosed herein. The present disclosure also provides transposon, a vector, a donor sequence or a donor plasmid comprising, consisting essential of or consisting of a nucleic acid sequence encoding the amino acid sequence of any chimeric stimulatory receptor (CSR) disclosed herein. In one aspect, the vector can be a viral vector. In one aspect, a viral vector can be an adenoviral vector, adeno-associated viral (AAV) vector, retroviral vector, lentiviral vector or a chimeric viral vector.

[0137] The present disclosure also provides a cell comprising, consisting essential of or consisting of any chimeric stimulatory receptor (CSR) disclosed herein. The present disclosure also provides a cell comprising, consisting essential of or consisting of a nucleic acid sequence encoding an amino acid sequence of any chimeric stimulatory receptor (CSR) disclosed herein. The present disclosure also provides a cell comprising, consisting essential of or consisting of a transposon, a vector, a donor sequence or a donor plasmid comprising, consisting essential of or consisting of a nucleic acid sequence encoding the amino acid sequence of any chimeric stimulatory receptor (CSR) disclosed herein. In one aspect, the vector can be a viral vector. In one aspect, a viral vector can be an adenoviral vector, adeno-associated viral (AAV) vector, retroviral vector, lentiviral vector or a chimeric viral vector. A cell of the present disclosure comprising, consisting essential of or consisting of any chimeric stimulatory receptor (CSR) disclosed herein can be an allogeneic cell or an autologous cell. In some preferred embodiments, the cell is an allogeneic cell.

[0138] The present disclosure also provides a composition comprising, consisting essential of or consisting of any chimeric stimulatory receptor (CSR) disclosed herein. The present disclosure also provides a composition comprising, consisting essential of or consisting of a nucleic acid sequence encoding an amino acid sequence of any chimeric stimulatory receptor (CSR) disclosed herein. The present disclosure also provides a composition comprising, consisting essential of or consisting of a transposon, a vector, a donor sequence or a donor plasmid comprising, consisting essential of or consisting of a nucleic acid sequence encoding the amino acid sequence of any chimeric stimulatory receptor (CSR) disclosed herein. In one aspect, the vector can be a viral vector. In one aspect, a viral vector can be an an adenoviral vector, adeno-associated viral (AAV) vector, retroviral vector, lentiviral vector or a chimeric viral vector. The present disclosure also provides a composition comprising, consisting essential of or consisting of a cell or a plurality of cells comprising, consisting essential of or consisting of any chimeric stimulatory receptor (CSR) disclosed herein.

[0139] The present disclosure provides a modified cell comprising, consisting essential of, or consisting of a chimeric stimulatory receptor (CSR) comprising, consisting essential of, or consisting of: (i) an ectodomain comprising an activation component, wherein the activation component is isolated or derived from a first protein; (ii) a transmembrane domain; and (iii) an endodomain comprising at least one signal transduction domain, wherein the at least one signal transduction domain is isolated or derived from a second protein; wherein the first protein and the second protein are not identical.

[0140] The present disclosure also provides a modified cell comprising, consisting essential of, or consisting of (a) a chimeric stimulatory receptor (CSR) comprising: (i) an ectodomain comprising an activation component, wherein the activation component is isolated or derived from a first protein; (ii) a transmembrane domain; and (iii) an endodomain comprising at least one signal transduction domain, wherein the at least one signal transduction domain is isolated or derived from a second protein; wherein the first protein and the second protein are not identical; and (b) an inducible proapoptotic polypeptide.

[0141] The present disclosure also provides a modified cell comprising, consisting essential of, or consisting of: (a) a chimeric stimulatory receptor (CSR) comprising: (i) an ectodomain comprising an activation component, wherein the activation component is isolated or derived from a first protein; (ii) a transmembrane domain; and (iii) an endodomain comprising at least one signal transduction domain, wherein the at least one signal transduction domain is isolated or derived from a second protein; wherein the first protein and the second protein are not identical; (b) a sequence encoding an inducible proapoptotic polypeptide; and wherein the cell is a T cell, (c) a modification of an endogenous sequence encoding a T cell Receptor (TCR), wherein the modification reduces or eliminates a level of expression or activity of the TCR.

[0142] The present disclosure provides a modified cell comprising, consisting essential of, or consisting of: (a) a modification of an endogenous sequence encoding Beta-2-Microglobulin (B2M), wherein the modification reduces or eliminates a level of expression or activity of a major histocompatibility complex (MEW) class I (MHC-I); and (b) a non-naturally occurring sequence comprising an HLA class I histocompatibility antigen, alpha chain E (HLA-E) polypeptide.

[0143] The present disclosure provides a modified T lymphocyte (T cell) comprising, consisting essential of, or consisting of: (a) a modification of an endogenous sequence encoding a T cell Receptor (TCR), wherein the modification reduces or eliminates a level of expression or activity of the TCR; and (b) chimeric stimulatory receptor (CSR) comprising: (i) an ectodomain comprising an activation component, wherein the activation component is isolated or derived from a first protein; (ii) a transmembrane domain; and (iii) an endodomain comprising at least one signal transduction domain, wherein the at least one signal transduction domain is isolated or derived from a second protein; wherein the first protein and the second protein are not identical.

[0144] The present disclosure provides a modified T lymphocyte (T cell) comprising, consisting essential of, or consisting of: (a) a modification of an endogenous sequence encoding a T cell Receptor (TCR), wherein the modification reduces or eliminates a level of expression or activity of the TCR; (b) chimeric stimulatory receptor (CSR) comprising: (i) an ectodomain comprising an activation component, wherein the activation component is isolated or derived from a first protein; (ii) a transmembrane domain; and (iii) an endodomain comprising at least one signal transduction domain, wherein the at least one signal transduction domain is isolated or derived from a second protein; wherein the first protein and the second protein are not identical; and (c) a non-naturally occurring chimeric antigen receptor.

[0145] The present disclosure provides a modified T lymphocyte (T cell) comprising, consisting essential of, or consisting of: (a) a modification of an endogenous sequence encoding a T cell Receptor (TCR), wherein the modification reduces or eliminates a level of expression or activity of the TCR; (b) a modification of an endogenous sequence encoding Beta-2-Microglobulin (B2M), wherein the modification reduces or eliminates a level of expression or activity of a major histocompatibility complex (MHC) class I (MHC-I); and (c) a chimeric stimulatory receptor (CSR) comprising: (i) an ectodomain comprising an activation component, wherein the activation component is isolated or derived from a first protein; (ii) a transmembrane domain; and (iii) an endodomain comprising at least one signal transduction domain, wherein the at least one signal transduction domain is isolated or derived from a second protein; wherein the first protein and the second protein are not identical.

[0146] The present disclosure provides a modified T lymphocyte (T cell) comprising, consisting essential of, or consisting of: (a) a modification of an endogenous sequence encoding a T cell Receptor (TCR), wherein the modification reduces or eliminates a level of expression or activity of the TCR; (b) a modification of an endogenous sequence encoding Beta-2-Microglobulin (B2M), wherein the modification reduces or eliminates a level of expression or activity of a major histocompatibility complex (MHC) class I (MHC-I); (c) a chimeric stimulatory receptor (CSR) comprising: (i) an ectodomain comprising an activation component, wherein the activation component is isolated or derived from a first protein; (ii) a transmembrane domain; and (iii) an endodomain comprising at least one signal transduction domain, wherein the at least one signal transduction domain is isolated or derived from a second protein; wherein the first protein and the second protein are not identical; and (d) a non-naturally occurring chimeric antigen receptor.

[0147] The present disclosure also provides a modified T lymphocyte (T cell) comprising, consisting essential of, or consisting of: (a) a modification of an endogenous sequence encoding a T cell Receptor (TCR), wherein the modification reduces or eliminates a level of expression or activity of the TCR; (b) a modification of an endogenous sequence encoding Beta-2-Microglobulin (B2M), wherein the modification reduces or eliminates a level of expression or activity of a major histocompatibility complex (MHC) class I (MHC-I); (c) a non-naturally occurring sequence comprising an HLA class I histocompatibility antigen, alpha chain E (HLA-E); and (d) a chimeric stimulatory receptor (CSR) comprising: (i) an ectodomain comprising an activation component, wherein the activation component is isolated or derived from a first protein; (ii) a transmembrane domain; and (iii) an endodomain comprising at least one signal transduction domain, wherein the at least one signal transduction domain is isolated or derived from a second protein; wherein the first protein and the second protein are not identical.

[0148] The present disclosure also provides a modified T lymphocyte (T cell) comprising, consisting essential of, or consisting of: (a) a modification of an endogenous sequence encoding a T cell Receptor (TCR), wherein the modification reduces or eliminates a level of expression or activity of the TCR; (b) a modification of an endogenous sequence encoding Beta-2-Microglobulin (B2M), wherein the modification reduces or eliminates a level of expression or activity of a major histocompatibility complex (MHC) class I (MHC-I); (c) a non-naturally occurring sequence comprising an HLA class I histocompatibility antigen, alpha chain E (HLA-E); (d) a chimeric stimulatory receptor (CSR) comprising: (i) an ectodomain comprising an activation component, wherein the activation component is isolated or derived from a first protein; (ii) a transmembrane domain; and (iii) an endodomain comprising at least one signal transduction domain, wherein the at least one signal transduction domain is isolated or derived from a second protein; wherein the first protein and the second protein are not identical; and (e) a non-naturally occurring chimeric antigen receptor.

[0149] The present disclosure also provides a modified T lymphocyte (T cell), consisting essential of, or consisting of: (a) a modification of an endogenous sequence encoding a T cell Receptor (TCR), wherein the modification reduces or eliminates a level of expression or activity of the TCR; (b) a modification that reduces or eliminates a level of expression or activity of a HLA class I histocompatibility antigen, alpha chain A (HLA-A), HLA class I histocompatibility antigen, alpha chain B (HLA-B), HLA class I histocompatibility antigen, alpha chain C (HLA-C), or a combination thereof; and (c) a chimeric stimulatory receptor (CSR) comprising: (i) an ectodomain comprising an activation component, wherein the activation component is isolated or derived from a first protein; (ii) a transmembrane domain; and (iii) an endodomain comprising at least one signal transduction domain, wherein the at least one signal transduction domain is isolated or derived from a second protein; wherein the first protein and the second protein are not identical.

[0150] The present disclosure also provides a modified T lymphocyte (T cell), consisting essential of, or consisting of: (a) a modification of an endogenous sequence encoding a T cell Receptor (TCR), wherein the modification reduces or eliminates a level of expression or activity of the TCR; (b) a modification that reduces or eliminates a level of expression or activity of a HLA class I histocompatibility antigen, alpha chain A (HLA-A), HLA class I histocompatibility antigen, alpha chain B (HLA-B), HLA class I histocompatibility antigen, alpha chain C (HLA-C), or a combination thereof; (c) a non-naturally occurring sequence comprising an HLA class I histocompatibility antigen, alpha chain E (HLA-E); and (d) a chimeric stimulatory receptor (CSR) comprising: (i) an ectodomain comprising an activation component, wherein the activation component is isolated or derived from a first protein; (ii) a transmembrane domain; and (iii) an endodomain comprising at least one signal transduction domain, wherein the at least one signal transduction domain is isolated or derived from a second protein; wherein the first protein and the second protein are not identical.

[0151] A modified cell of the present disclosure (preferably a modified T cell of the present disclosure) can further comprise, consist essentially of, or consist of an inducible proapoptotic polypeptide. The inducible proapoptotic polypeptide comprises, consists essentially of, or consists of the amino acid sequence at least 95% identical to the amino acid sequence of SEQ ID NO: 62. The inducible proapoptotic polypeptide comprises, consists essentially of, or consists of the amino acid sequence at least 99% identical to the amino acid sequence of SEQ ID NO: 62. The inducible proapoptotic polypeptide comprises, consists essentially of, or consists of the amino acid sequence of SEQ ID NO: 62.

[0152] A modified cell of the present disclosure (preferably a modified T cell of the present disclosure) can further comprise, consist essentially of, or consist of a modification of an endogenous sequence encoding Beta-2-Microglobulin (B2M), wherein the modification reduces or eliminates a level of expression or activity of a major histocompatibility complex (MHC) class I (MHC-I). A reduction of a level of expression or activity is when at least 50%, at least 75%, at least 90%, at least 91%, at least 92%, at least 93%, at least 94%, at least 95%, at least 96%, at least 97%, at least 98%, or at least 99% of the expression of the MHC-I in a cell or the functional activity of the MHC-I in a cell is reduced when compared to the naturally occurring wild-type counterpart of the cell. A reduction of a level of expression or activity is when at least 50%, at least 75%, at least 90%, at least 91%, at least 92%, at least 93%, at least 94%, at least 95%, at least 96%, at least 97%, at least 98%, or at least 99% of the expression of the MHC-I in a T cell or the functional activity of the MHC-I in a T cell is reduced when compared to a naturally occurring wild-type T cell. An elimination a level of expression or activity is when 100% of the expression of the MHC-I in a cell or the functional activity of the MHC-I in a cell is reduced when compared to the naturally occurring wild-type counterpart of the cell. An elimination a level of expression or activity is when 100% of the expression of the MHC-I in a T cell or the functional activity of the MEW-I in a T cell is reduced when compared to the naturally occurring wild-type T cell.

[0153] A modified cell of the present disclosure (preferably a modified T cell of the present disclosure) can further comprise, consist essentially of, or consist of a non-naturally occurring polypeptide comprising an HLA class I histocompatibility antigen, alpha chain E (HLA-E). The HLA-E polypeptide comprises, consists essentially of, or consists of the amino acid sequence at least 95% identical to the amino acid sequence of SEQ ID NO: 63. The HLA-E polypeptide comprises, consists essentially of, or consists of the amino acid sequence at least 99% identical to the amino acid sequence of SEQ ID NO: 63. The HLA-E polypeptide comprises, consists essentially of, or consists of the amino acid sequence of SEQ ID NO: 63.

[0154] The non-naturally occurring polypeptide comprising a HLA-E can further comprise, consist essentially of, or consist of a B2M signal peptide. The B2M signal peptide comprises, consists essentially of, or consists of the amino acid sequence at least 95% identical to the amino acid sequence of SEQ ID NO: 64. The B2M signal peptide comprises, consists essentially of, or consists of the amino acid sequence at least 99% identical to the amino acid sequence of SEQ ID NO: 64. The B2M signal peptide comprises, consists essentially of, or consists of the amino acid sequence of SEQ ID NO: 64.

[0155] The non-naturally occurring polypeptide comprising a HLA-E can further comprise, consist essentially of, or consist of a B2M polypeptide. The B2M polypeptide comprises, consists essentially of, or consists of the amino acid sequence at least 95% identical to the amino acid sequence of SEQ ID NO: 65. The B2M polypeptide comprises, consists essentially of, or consists of the amino acid sequence at least 99% identical to the amino acid sequence of SEQ ID NO: 65. The B2M polypeptide comprises, consists essentially of, or consists of the amino acid sequence of SEQ ID NO: 65.

[0156] The non-naturally occurring polypeptide comprising a HLA-E can further comprise, consist essentially of, or consist of a linker molecule (referred to herein as a linker). The non-naturally occurring polypeptide comprising a HLA-E can further comprise, consist essentially of, or consist of a linker, wherein the linker is positioned between the B2M polypeptide and the HLA-E polypeptide. The linker comprises, consists essentially of, or consists of the amino acid sequence at least 95% identical to the amino acid sequence of SEQ ID NO: 66. The linker comprises, consists essentially of, or consists of the amino acid sequence at least 99% identical to the amino acid sequence of SEQ ID NO: 66. The linker comprises, consists essentially of, or consists of the amino acid sequence of SEQ ID NO: 66.

[0157] The non-naturally occurring polypeptide comprising a HLA-E can further comprise, consist essentially of, or consist of a peptide and a B2M polypeptide. The peptide comprises, consists essentially of, or consists of the amino acid sequence at least 95% identical to the amino acid sequence of SEQ ID NO: 67. The peptide comprises, consists essentially of, or consists of the amino acid sequence at least 99% identical to the amino acid sequence of SEQ ID NO: 67. The peptide comprises, consists essentially of, or consists of the amino acid sequence of SEQ ID NO: 67.

[0158] The non-naturally occurring polypeptide comprising a HLA-E can further comprise, consist essentially of, or consist of a first linker positioned between the B2M signal peptide and the peptide, and a second linker positioned between the B2M polypeptide and the HLA-E polypeptide. The first linker comprises, consists essentially of, or consists of the amino acid sequence at least 95% identical to the amino acid sequence of SEQ ID NO: 68. The first linker comprises, consists essentially of, or consists of the amino acid sequence at least 99% identical to the amino acid sequence of SEQ ID NO: 68. The first linker comprises, consists essentially of, or consists of the amino acid sequence of SEQ ID NO: 68. The second linker comprises, consists essentially of, or consists of the amino acid sequence at least 95% identical to the amino acid sequence of SEQ ID NO: 66. The second linker comprises, consists essentially of, or consists of the amino acid sequence at least 99% identical to the amino acid sequence of SEQ ID NO: 66. The second linker comprises, consists essentially of, or consists of the amino acid sequence of SEQ ID NO: 66.

[0159] In one aspect, the non-naturally occurring polypeptide comprising an HLA-E comprises, consists essentially of, or consists of a B2M signal peptide, a peptide, a first linker, a B2M polypeptide, a second linker and an HLA-E polypeptide. The peptide can be positioned between the B2M signal peptide and the first linker, the B2M polypeptide can be positioned between the first linker and the second linker and the second linker can be positioned between the B2M polypeptide and the HLA-E polypeptide. The non-naturally occurring polypeptide comprising an HLA-E comprises, consists essentially of, or consists of the amino acid sequence at least 95% identical to the amino acid sequence of SEQ ID NO: 69. The non-naturally occurring polypeptide comprising an HLA-E comprises, consists essentially of, or consists of the amino acid sequence at least 99% identical to the amino acid sequence of SEQ ID NO: 69. The non-naturally occurring polypeptide comprising an HLA-E comprises, consists essentially of, or consists of the amino acid sequence of SEQ ID NO: 69. The non-naturally occurring polypeptide comprising an HLA-E can be encoded by the nucleic acid have the sequence of SEQ ID NO: 70.

[0160] In one aspect, the non-naturally occurring polypeptide comprising an HLA-E comprises, consists essentially of, or consists of a B2M signal peptide, a B2M polypeptide, a linker and an HLA-E polypeptide. The B2M polypeptide can be positioned between the B2M signal peptide and the linker, the linker can be positioned between the B2M polypeptide and the HLA-E polypeptide. The non-naturally occurring polypeptide comprising an HLA-E comprises, consists essentially of, or consists of the amino acid sequence at least 95% identical to the amino acid sequence of SEQ ID NO: 71. The non-naturally occurring polypeptide comprising an HLA-E comprises, consists essentially of, or consists of the amino acid sequence at least 99% identical to the amino acid sequence of SEQ ID NO: 71. The non-naturally occurring polypeptide comprising an HLA-E comprises, consists essentially of, or consists of the amino acid sequence of SEQ ID NO: 71. The non-naturally occurring polypeptide comprising an HLA-E can be encoded by the nucleic acid have the sequence of SEQ ID NO: 72.

[0161] In one aspect, the non-naturally occurring polypeptide comprising an HLA-E comprises, consists essentially of, or consists of a B2M signal peptide and an HLA-E polypeptide. The B2M signal peptide can be positioned before (e.g., 5′ in the context of a nucleic acid sequence or amino terminus in the context of an amino acid sequence) HLA-E polypeptide. The non-naturally occurring polypeptide comprising an HLA-E comprises, consists essentially of, or consists of the amino acid sequence at least 95% identical to the amino acid sequence of SEQ ID NO: 73. The non-naturally occurring polypeptide comprising an HLA-E comprises, consists essentially of, or consists of the amino acid sequence at least 99% identical to the amino acid sequence of SEQ ID NO: 73. The non-naturally occurring polypeptide comprising an HLA-E comprises, consists essentially of, or consists of the amino acid sequence of SEQ ID NO: 73. The non-naturally occurring polypeptide comprising an HLA-E can be encoded by the nucleic acid have the sequence of SEQ ID NO: 74.

[0162] A modified cell of the present disclosure (preferably a modified T cell of the present disclosure) can further comprise, consist essentially of, or consist of a non-naturally occurring antigen receptor, a sequence encoding a therapeutic polypeptide, or a combination thereof. In a preferred aspect, the non-naturally occurring antigen receptor comprises, consists essentially of or consists of a chimeric antigen receptor (CAR). The CAR comprise, consist essentially of, or consist of (a) an ectodomain comprising an antigen recognition region, (b) a transmembrane domain, and (c) an endodomain comprising at least one costimulatory domain. The ectodomain of the CAR can further comprise, consist essentially of, or consist of a signal peptide. The ectodomain of the CAR can further comprise, consist essentially of, or consist of a hinge between the antigen recognition region and the transmembrane domain. The endodomain of the CAR can further comprise, consist essentially of, or consist of a human CD3 endodomain. The at least one costimulatory domain of the CAR can further comprise, consist essentially of, or consist of a human 4-1BB, CD28, CD40, ICOS, MyD88, OX-40 intracellular segment, or any combination thereof. In a preferred aspect, at least one costimulatory domain comprises a human CD28 and/or a 4-1BB costimulatory domain.

[0163] A modified cell of the present disclosure can be an immune cell or an immune cell precursor. The immune cell can be a regulatory T cell (Treg), a lymphoid progenitor cell, a natural killer (NK) cell, a cytokine induced killer (CIK) cell, a T lymphocyte (T cell), including effector T-cells, a B lymphocyte (B-cell) or an antigen presenting cell (APC). In preferred aspects, the immune cell is a T cell, an early memory T cell, a stem cell-like T cell, a stem memory T cell (T_{SCM}), a central memory T cell (T_{CM}) or a stem cell-like T cell. The immune cell precursor can a hematopoietic stem cell (HSC). The modified cell can be a stem cell, a differentiated cell, a somatic cell or an antigen presenting cell (APC). The modified cell can be an autologous cell or an allogeneic cell. In one aspect, the cell is a modified allogeneic T cell. In another aspect, the cell is modified allogeneic T cell expressing a chimeric antigen receptor (CAR), a CAR T cell.

[0164] A modified cell of the present disclosure (preferably a modified T cell of the present disclosure) can express a CSR of the present disclosure transiently or stably. In one aspect, a CSR of the present disclosure is transiently expressed in a modified cell of the present disclosure (preferably a modified T cell of the present disclosure). In one aspect, a CSR of the present disclosure is stably expressed in a modified cell of the present disclosure (preferably a modified T cell of the present disclosure).

[0165] A modified cell of the present disclosure (preferably a modified T cell of the present disclosure) can express a non-naturally occurring polypeptide comprising the HLA-E of the present disclosure transiently or stably. In one aspect, a non-naturally occurring polypeptide comprising the HLA-E of the present disclosure is transiently expressed in a modified cell of the present disclosure (preferably a modified T cell of the present disclosure). In one aspect, a non-naturally occurring polypeptide comprising the HLA-E of the present disclosure is stably expressed in a modified cell of the present disclosure (preferably a modified T cell of the present disclosure).

[0166] A modified cell of the present disclosure (preferably a modified T cell of the present disclosure) can express an inducible proapoptotic polypeptide of the present disclosure transiently or stably. In one aspect, an inducible proapoptotic polypeptide of the present disclosure is transiently expressed in a modified cell of the present disclosure (preferably a modified T cell of the present disclosure). In a preferred aspect, an inducible proapoptotic polypeptide of the present disclosure is stably expressed in a modified cell of the present disclosure (preferably a modified T cell of the present disclosure).

[0167] A modified cell of the present disclosure (preferably a modified T cell of the present disclosure) can express a non-naturally occurring antigen receptor or a sequence encoding a therapeutic protein of the present disclosure transiently or stably. In one aspect, a non-naturally occurring antigen receptor or a sequence encoding a therapeutic protein of the present disclosure is transiently expressed in a modified cell of the present disclosure (preferably a modified T cell of the present disclosure). In a preferred aspect, a non-naturally occurring antigen receptor or a sequence encoding a therapeutic protein of the present disclosure is stably expressed in a modified cell of the present disclosure (preferably a modified T cell of the present disclosure).

[0168] In one aspect, a CSR of the present disclosure is stably expressed, the inducible proapoptotic polypeptide of the present disclosure is stably expressed and a non-naturally occurring antigen receptor or a sequence encoding a therapeutic protein is stably expressed in a modified cell of the present disclosure (preferably a modified T cell of the present disclosure).

[0169] In one aspect, a CSR of the present disclosure is stably expressed, a non-naturally occurring polypeptide comprising the HLA-E of the present disclosure is stably expressed, the inducible proapoptotic polypeptide of the present disclosure is stably expressed and a non-naturally occurring antigen receptor or a sequence encoding a therapeutic protein is stably expressed in a modified cell of the present disclosure (preferably a modified T cell of the present disclosure).

[0170] In one aspect, a CSR of the present disclosure is stably expressed, a non-naturally occurring polypeptide comprising the HLA-E of the present disclosure is transiently expressed, the inducible proapoptotic polypeptide of the present disclosure is stably expressed and a non-naturally occurring antigen receptor or a sequence encoding a therapeutic protein is stably expressed in a modified cell of the present disclosure (preferably a modified T cell of the present disclosure).

[0171] In one aspect, a CSR of the present disclosure is transiently expressed, the inducible proapoptotic polypeptide of the present disclosure is stably expressed and the non-naturally occurring antigen receptor or a sequence encoding a therapeutic protein is stably expressed in a modified cell of the present disclosure (preferably a modified T cell of the present disclosure).

[0172] In one aspect, a CSR of the present disclosure is transiently expressed, a non-naturally occurring polypeptide comprising the HLA-E of the present disclosure is transiently expressed, the inducible proapoptotic polypeptide of the present disclosure is stably expressed and a non-naturally occurring antigen receptor or a sequence encoding a therapeutic protein is stably expressed in a modified cell of the present disclosure (preferably a modified T cell of the present disclosure).

[0173] In one aspect, a CSR of the present disclosure is transiently expressed, a non-naturally occurring polypeptide comprising the HLA-E of the present disclosure is stably expressed, the inducible proapoptotic polypeptide of the present disclosure is stably expressed and a non-naturally occurring antigen receptor or a sequence encoding a therapeutic protein is stably expressed in a modified cell of the present disclosure (preferably a modified T cell of the present disclosure).

[0174] The present disclosure provides a modified cell (preferably a modified T cell comprising, consisting essential of, or consisting of (a) a modification of an endogenous sequence encoding a T cell Receptor (TCR), wherein the modification reduces or eliminates a level of expression or activity of the TCR; and (b) a sequence encoding a chimeric stimulatory receptor (CSR) comprising: (i) an ectodomain comprising an activation component, wherein the activation component is isolated or derived from a first protein; (ii) a transmembrane domain; and (iii) an endodomain comprising at least one signal transduction domain, wherein the at least one signal transduction domain is isolated or derived from a second protein; wherein the first protein and the second protein are not identical.

[0175] The modified cell further can further comprise, consist essentially of or consist of a sequence encoding an inducible proapoptotic polypeptide. The modified cell can further comprise, consist essentially of or consist of a sequence encoding a non-naturally occurring antigen receptor, a sequence encoding a therapeutic polypeptide, or a combination thereof. The non-naturally occurring antigen receptor can comprise, consist essentially of or consist of a chimeric antigen receptor (CAR).

[0176] A transposon, a vector, a donor sequence or a donor plasmid can comprise, consist essentially of or consist of the sequence encoding the CSR, the sequence encoding the inducible proapoptotic polypeptide, or a combination thereof. The transposon, the vector, the donor sequence or the donor plasmid can further comprise, consist essentially of or consist of a sequence encoding a non-naturally occurring antigen receptor or a sequence encoding a therapeutic protein. The transposon, the vector, the donor sequence, or the donor plasmid can further comprise, consist essentially of or consist of a sequence encoding a selection marker. The transposon can be a piggyBac® transposon, a piggyBac® like transposon, a Sleeping Beauty transposon, a Helraiser transposon, a To12 transposon or a TcBuster transposon. The sequence encoding the CSR can be transiently expressed in the cell. The sequence encoding the CSR can be stably expressed in the cell. The sequence encoding the inducible proapoptotic polypeptide can be stably expressed in the cell. The sequence encoding a non-naturally occurring antigen receptor or a sequence encoding a therapeutic protein is stably expressed in the cell. In some aspects, the sequence encoding the CSR can be transiently expressed in the cell and the sequence encoding the inducible proapoptotic polypeptide can be stably expressed in the cell. In some aspects, the sequence encoding the CSR can be stably expressed in the cell and the sequence encoding the inducible proapoptotic polypeptide can be stably expressed in the cell. In some aspects, the sequence encoding the CSR can be transiently expressed in the cell, the sequence encoding the inducible proapoptotic polypeptide can be stably expressed in the cell and sequence encoding a non-naturally occurring antigen receptor or a sequence encoding a therapeutic protein is stably expressed in the cell. In some aspects, the sequence encoding the CSR can be stably expressed in the cell, the sequence encoding the inducible proapoptotic polypeptide can be stably expressed in the cell and sequence encoding a non-naturally occurring antigen receptor or a sequence encoding a therapeutic protein is stably expressed in the cell. In one aspect, the vector can be a viral vector. In one aspect, a viral vector can be an an adenoviral vector, adeno-associated viral (AAV) vector, retroviral vector, lentiviral vector or a chimeric viral vector.

[0177] A first transposon, a first vector, a first donor sequence, or a first donor plasmid can comprise, consist essentially of or consist of the sequence encoding the CSR. The first transposon, the first vector, the first donor sequence, or the first donor plasmid can further comprise, consist essentially of or consist of a sequence encoding a first selection marker.

[0178] A second transposon, a second vector, a second donor sequence, or a second donor plasmid can comprise, consist essentially of or consist of one or more of the sequence encoding the inducible proapoptotic polypeptide, the sequence encoding a non-naturally occurring antigen receptor, and the sequence encoding a therapeutic protein. The second transposon, the second vector, the second donor sequence, or the second donor plasmid can further comprise, consist essentially of or consist of a sequence encoding a second selection marker. The first selection marker and the second selection marker are identical. The first selection marker and the second selection marker are not identical. The selection marker can comprise, consist essentially of or consist of a cell surface marker. The selection marker can comprise, consist essentially of or consist of a protein that is active in dividing cells and not active in non-dividing cells. The selection marker can comprise, consist essentially of or consist of a metabolic marker.

[0179] In one aspect, the selection marker can comprise, consist essentially of or consist of a dihydrofolate reductase (DHFR) mutein enzyme. The DHFR mutein enzyme can comprise, consist essentially of or consist of the amino acid sequence of SEQ ID NO: 75.

[0180] The DHFR mutein enzyme of SEQ ID NO: 75 can further comprise, consist essentially of or consist of a mutation at one or more of positions 80, 113, or 153. The amino acid sequence of the DHFR mutein enzyme of SEQ ID NO: 75 can further comprise, consist essentially of or consist of one or more of a substitution of a Phenylalanine (F) or a Leucine (L) at position 80; a substitution of a Leucine (L) or a Valine (V) at position 113, and a substitution of a Valine (V) or an Aspartic Acid (D) at position 153.

[0181] A modified cell of the present disclosure (preferably a modified T cell of the present disclosure) can further comprise, consist essentially of or consist of a gene editing composition. The gene editing composition can comprise, consist essentially of or consist of a sequence encoding a DNA binding domain and a sequence encoding a nuclease protein or a nuclease domain thereof. The gene editing composition can be expressed transiently by the modified cell. The gene editing composition can be expressed stably by the modified cell.

[0182] The gene editing composition can comprise, consist essentially of or consist of a sequence encoding a nuclease protein or a sequence encoding a nuclease domain thereof. The sequence encoding a nuclease protein or the sequence encoding a nuclease domain thereof can comprise, consist essentially of or consist of a DNA sequence, an RNA sequence, or a combination thereof. The nuclease or the nuclease domain thereof can comprise, consist essentially of or consist of one or more of a CRISPR/Cas protein, a Transcription Activator-Like Effector Nuclease (TALEN), a Zinc Finger Nuclease (ZFN), and an endonuclease. The CRISPR/Cas protein can comprise, consist essentially of or consist of a nuclease-inactivated Cas (dCas) protein. The nuclease or the nuclease domain thereof can comprise, consist essentially of or consist of a nuclease-inactivated Cas (dCas) protein and an endonuclease. The endonuclease can comprise, consist essentially of or consist of a Clo051 nuclease or a nuclease domain thereof. The gene editing composition can comprise, consist essentially of or consist of a fusion protein. The fusion protein can comprise, consist essentially of or consist of a nuclease-inactivated Cas9 (dCas9) protein and a Clo051 nuclease or a Clo051 nuclease domain. The fusion protein can comprise, consist essentially of or consist of the amino acid sequence of SEQ ID NO: 76. The fusion protein is encoded by a nucleic acid comprising, consisting essentially of or consisting of the sequence of SEQ ID NO: 77. The fusion protein can comprise, consist essentially of or consist of the amino acid sequence of SEQ ID NO: 78. The fusion protein is encoded by a nucleic acid comprising, consisting essential of or consisting of the sequence of SEQ ID NO: 79.

[0183] The gene editing composition can further comprise, consist essentially of or consist of a guide sequence. The guide sequence can comprise, consist essentially of or consist of an RNA sequence. In aspects when the modified cell is a T cell, e.g., a Treg or an effector T-cell, the guide RNA can comprise, consist essentially of or consist of a sequence complementary to a target sequence encoding an endogenous TCR. The guide RNA can comprise, consist essentially of or consist of a sequence complementary to a target sequence encoding a B2M polypeptide. The guide RNA can comprise, consist essentially of or consist of a sequence complementary to a target sequence within a safe harbor site of a genomic DNA sequence.

[0184] The transposon, the vector, the donor sequence or the donor plasmid can further comprise, consist essentially of or consist of a gene editing composition comprising a guide sequence and a sequence encoding a fusion protein comprising a sequence encoding an inactivated Cas9 (dCas9) and a sequence encoding a Clo051 nuclease or a nuclease domain thereof.

[0185] The first transposon, the first vector, the first donor sequence or the first donor plasmid can further comprise, consist essentially of or consist of a gene editing composition comprising a guide sequence and a sequence encoding a fusion protein comprising a sequence encoding an inactivated Cas9 (dCas9) and a sequence encoding a Clo051 nuclease or a nuclease domain thereof.

[0186] The second transposon, the second vector, the second donor sequence or the second donor plasmid can further comprise, consist essentially of or consist of a gene editing composition comprising a guide sequence and a sequence encoding a fusion protein comprising a sequence encoding an inactivated Cas9 (dCas9) and a sequence encoding a Clo051 nuclease or a nuclease domain thereof.

[0187] A third transposon, a third vector, a third donor sequence or a third donor plasmid can comprise, consist essentially of or consist of a gene editing composition comprising a guide sequence and a sequence encoding a fusion protein comprising a sequence encoding an inactivated Cas9 (dCas9) and a sequence encoding a Clo051 nuclease or a nuclease domain thereof.

[0188] The Clo051 nuclease or a nuclease domain thereof can induce a single or double strand break in a target sequence. The donor sequence or a donor plasmid can integrate at a position of single or double strand break or at a position of cellular repair within a target sequence, or a combination thereof.

[0189] The present disclosure provides a composition comprising, consisting essential of, or consisting of a modified cell of the present disclosure (preferably a modified T cell of the present disclosure).

[0190] The present disclosure provides a plurality of modified cells comprising any non-naturally occurring chimeric stimulatory receptor (CSR) disclosed herein and provides a plurality of modified cells comprising any modified cell disclosed herein. The plurality of modified cells can comprise, consist essentially of, or consist of immune cells or an immune cell precursors. The plurality of immune cells can comprise, consist essentially of, or consist of lymphoid progenitor cells, natural killer (NK) cells, cytokine induced killer (CIK) cells, T lymphocytes (T cells), e.g., a Treg or an effector T cell, B lymphocytes (B-cells) or antigen presenting cells (APCs).

[0191] The present disclosure provides a composition comprising a population of modified cells, wherein a plurality of the modified cells of the population comprise any non-naturally occurring chimeric stimulatory receptor (CSR) disclosed herein and provides a composition comprising a population of modified cells, wherein a plurality of the modified cells of the population comprise any modified cell disclosed herein. The population of modified cells can comprise, consist essentially of, or consist of immune cells or an immune cell precursors. The population of immune cells can comprise, consist essentially of, or consist of lymphoid progenitor cells, natural killer (NK) cells, cytokine induced killer (CIK) cells, T lymphocytes (T cells), e.g., a Treg or an effector T cell, B lymphocytes (B-cells) or antigen presenting cells (APCs). The composition can comprise a pharmaceutically-acceptable carrier.

[0192] The present disclosure provides a composition comprising a population of modified T lymphocytes (T cells), wherein a plurality of the modified T cells of the population comprise any non-naturally occurring chimeric stimulatory receptor (CSR) disclosed herein and provides a composition comprising a population of T lymphocytes (T cells), e.g., a Treg or an effector T cell, wherein a plurality of the T cells of the population comprise any modified T cell disclosed herein. The composition can comprise a pharmaceutically-acceptable carrier.

[0193] Preferably, the present disclosure provides a composition comprising a population of T lymphocytes (T cells), e.g., a Treg or an effector T cell, wherein a plurality of the T cells of the population comprise a non-naturally occurring chimeric stimulatory receptor (CSR) comprising, consisting essential of, or consisting of: (a) an ectodomain comprising a activation component, wherein the activation component is isolated or derived from a first protein; (b) a transmembrane domain; and (c) an endodomain comprising at least one signal transduction domain, wherein the at least one signal transduction domain is isolated or derived from a second protein, wherein the first protein and the second protein are not identical. The composition can comprise a pharmaceutically-acceptable carrier. In some aspects, at least 5%, at least 10%, at least 15%, at least 20%, at least 25%, at least 30%, at least 35%, at least 40%, at least 45%, at least 50%, at least 55%, at least 60%, at least 65%, at least 70%, at least 75%, at least 80%, at least 85%, at least 90%, at least 95%, at least 96%, at least 97%, at least 98%, at least 99%, or 100% of the population comprise the CSR.

[0194] The plurality of the T cells of the population can further comprise an inducible proapoptotic polypeptide. In some aspects, at least 5%, at least 10%, at least 15%, at least 20%, at least 25%, at least 30%, at least 35%, at least 40%, at least 45%, at least 50%, at least 55%, at least 60%, at least 65%, at least 70%, at least 75%, at least 80%, at least 85%, at least 90%, at least 95%, at least 96%, at least 97%, at least 98%, at least 99%, or 100% of the population comprise the inducible proapoptotic polypeptide.

[0195] The plurality of the T cells of the population can further comprise a modification of an endogenous sequence encoding a T cell Receptor (TCR), wherein the modification reduces or eliminates a level of expression or activity of the TCR. In some aspects, at least 5%, at least 10%, at least 15%, at least 20%, at least 25%, at least 30%, at least 35%, at least 40%, at least 45%, at least 50%, at least 55%, at least 60%, at least 65%, at least 70%, at least 75%, at least 80%, at least 85%, at least 90%, at least 95%, at least 96%, at least 97%, at least 98%, at least 99%, or 100% of the population comprise the modification of the endogenous sequence encoding the TCR, wherein the modification reduces or eliminates a level of expression or activity of the TCR.

[0196] The plurality of the T cells of the population can further comprise a modification of an endogenous sequence encoding Beta-2-Microglobulin (B2M), wherein the modification reduces or eliminates a level of expression or activity of a major histocompatibility complex (MHC) class I (MHC-I). In some aspects, at least 5%, at least 10%, at least 15%, at least 20%, at least 25%, at least 30%, at least 35%, at least 40%, at least 45%, at least 50%, at least 55%, at least 60%, at least 65%, at least 70%, at least 75%, at least 80%, at least 85%, at least 90%, at least 95%, at least 96%, at least 97%, at least 98%, at least 99%, or 100% of the population comprise the modification of the endogenous sequence encoding B2M, wherein the modification reduces or eliminates a level of expression or activity of MHC-I.

[0197] The plurality of the T cells of the population can further comprise a modification of an endogenous sequence encoding a T cell Receptor (TCR), wherein the modification reduces or eliminates a level of expression or activity of the TCR and a modification of an endogenous sequence encoding Beta-2-Microglobulin (B2M), wherein the modification reduces or eliminates a level of expression or activity of a major histocompatibility complex (MHC) class I (MHC-I).

[0198] In some aspects, at least 5%, at least 10%, at least 15%, at least 20%, at least 25%, at least 30%, at least 35%, at least 40%, at least 45%, at least 50%, at least 55%, at least 60%, at least 65%, at least 70%, at least 75%, at least 80%, at least 85%, at least 90%, at least 95%, at least 96%, at least 97%, at least 98%, at least 99%, or 100% of the population comprise both modification of the endogenous sequence encoding the TCR, wherein the modification reduces or eliminates a level of expression or activity of the TCR and the modification of the endogenous sequence encoding B2M, wherein the modification reduces or eliminates a level of expression or activity of MHC-I.

[0199] The plurality of the T cells of the population can further comprise a non-naturally occurring sequence comprising an HLA class I histocompatibility antigen, alpha chain E (HLA-E) polypeptide. In some aspects, at least 5%, at least 10%, at least 15%, at least 20%, at least 25%, at least 30%, at least 35%, at least 40%, at least 45%, at least 50%, at least 55%, at least 60%, at least 65%, at least 70%, at least 75%, at least 80%, at least 85%, at least 90%, at least 95%, at least 96%, at least 97%, at least 98%, at least 99%, or 100% of the population comprise the non-naturally occurring sequence comprising the HLA-E polypeptide.

[0200] The plurality of the T cells of the population can further comprise a non-naturally occurring antigen receptor, a sequence encoding a therapeutic polypeptide, or a combination thereof. In some aspects, at least 5%, at least 10%, at least 15%, at least 20%, at least 25%, at least 30%, at least 35%, at least 40%, at least 45%, at least 50%, at least 55%, at least 60%, at least 65%, at least 70%, at least 75%, at least 80%, at least 85%, at least 90%, at least 95%, at least 96%, at least 97%, at least 98%, at least 99%, or 100% of the population comprise the non-naturally occurring antigen receptor, the sequence encoding a therapeutic polypeptide, or a combination thereof. In preferred aspects, the non-naturally occurring antigen receptor is a chimeric antigen receptor (CAR).

[0201] The plurality of the T cells of the population can comprise an early memory T cell, a stem cell-like T cell, a stem memory T cell (T_{SCM}), a central memory T cell (T_{CM}) or a stem cell-like T cell. In some aspects, one or more of a stem cell-like T cell, a stem cell memory T cell (T_{SCM}) and a central memory T cell (T_{CM}) comprise at least 5%, at least 10%, at least 15%, at least 20%, at least 25%, at least 30%, at least 35%, at least 40%, at least 45%, at least 50%, at least 55%, at least 60%, at least 65%, at least 70%, at least 75%, at least 80%, at least 85%, at least 90%, at least 95%, at least 96%, at least 97%, at least 98%, at least 99%, or 100% of the population of modified T cells.

[0202] In some aspects, at least 5%, at least 10%, at least 15%, at least 20%, at least 25%, at least 30%, at least 35%, at least 40%, at least 45%, at least 50%, at least 55%, at least 60%, at least 65%, at least 70%, at least 75%, at least 80%, at least 85%, at least 90%, at least 95%, at least 96%, at least 97%, at least 98%, at least 99%, or 100% of the population comprising the CSR expresses one or more cell-surface marker(s) of a stem memory T cell (T_{SCM}) or a T_{SCM}-like cell; and wherein the one or more cell-surface marker(s) comprise CD45RA and CD62L.

[0203] In some aspects, at least 5%, at least 10%, at least 15%, at least 20%, at least 25%, at least 30%, at least 35%, at least 40%, at least 45%, at least 50%, at least 55%, at least 60%, at least 65%, at least 70%, at least 75%, at least 80%, at least 85%, at least 90%, at least 95%, at least 96%, at least 97%, at least 98%, at least 99%, or 100% of the population expresses one or more cell-surface marker(s) of a central memory T cell (T_{CM}) or a T_{CM}-like cell; and wherein the one or more cell-surface marker(s) comprise CD45RO and CD62L.

[0204] In some aspects, at least 5%, at least 10%, at least 15%, at least 20%, at least 25%, at least 30%, at least 35%, at least 40%, at least 45%, at least 50%, at least 55%, at least 60%, at least 65%, at least 70%, at least 75%, at least 80%, at least 85%, at least 90%, at least 95%, at least 96%, at least 97%, at least 98%, at least 99%, or 100% of the population expresses one or more of CD127, CD45RO, CD95 and IL-2Rβ cell-surface marker(s).

[0205] The present disclosure provides compositions for use in the treatment of a disease or disorder disclosed herein or the use of a composition for the treatment of any disease or disorder disclosed herein. The present disclosure also provides methods of treating a disease or disorder comprising, consisting essential of, or consisting of administering to a subject in need thereof a therapeutically-effective amount of a composition disclosed herein. The compositions can comprise, consist essentially of or consist of any of the modified cells or populations of modified cells disclosed herein. Preferably, any of the modified T cells or CAR T cells disclosed herein.

[0206] The present disclosure provides a method of producing a modified T cell comprising, consisting essential of, or consisting of, introducing into a primary human T cell a composition comprising a Chimeric Stimulator Receptor (CSR) of the present disclosure or a sequence encoding the same to produce a modified T cell under conditions that stably express the CSR within the modified T cell and preserve desirable stem-like properties of the modified T cell. The primary human T cell can be a resting primary human T cell. The present disclosure provides a modified T cell produced by the disclosed method. The present disclosure provides a method of administering the modified T cell comprising the stably expressed CSR produced by the disclosed method. The present disclosure provides the method of administering the modified T cell comprising the stably expressed CSR produced by the disclosed method to treat a disease or disorder.

[0207] The present disclosure provides a method of producing a population of modified T cells comprising, consisting essential of, or consisting of, introducing into a plurality of primary human T cells a composition comprising a Chimeric Stimulator Receptor (CSR) of the present disclosure or a sequence encoding the same to produce a plurality of modified T cells under conditions that stably express the CSR within the plurality of modified T cells and preserve desirable stem-like properties of the plurality of modified T cells. The primary human T cells can comprise resting primary human T cells. The present disclosure provides a population of modified T cells produced by the disclosed method. The present disclosure provides a method of administering the population of modified T cells comprising the stably expressed CSR produced by the disclosed method. The present disclosure provides a method of administering the population of modified T cells comprising the stably expressed CSR produced by the disclosed method to treat a disease or disorder.

[0208] The present disclosure provides a method of producing a modified T cell comprising, consisting essential of, or consisting of, introducing into a primary human T cell a composition comprising a Chimeric Stimulator Receptor (CSR) of the present disclosure or a sequence encoding the same to produce a modified T cell under conditions that transiently express the CSR within the modified T cell and preserve desirable stem-like properties of the modified T cell. The primary human T cell can be a resting primary human T cell. The present disclosure provides a modified T cell produced by the disclosed method. The present disclosure provides a method of administering the modified T cell comprising the transiently expressed CSR produced by the disclosed method. In one aspect, the present disclosure provides a method of administering the modified T cell produced by the disclosed method after the modified T cell no longer expresses the CSR. The present disclosure provides a method of administering a modified T cell comprising the transiently expressed CSR produced by the disclosed method to treat a disease or disorder. In one aspect, the present disclosure provides a method of administering the modified T cell produced by the disclosed method after the modified T cell no longer expresses the CSR to treat a disease or disorder.

[0209] The present disclosure provides a method of producing a population of modified T cells comprising, consisting essential of, or consisting of, introducing into a plurality of primary human T cells a composition comprising a Chimeric Stimulator Receptor (CSR) of the present disclosure or a sequence encoding the same to produce a plurality of modified T cells under conditions that transiently express the CSR within the plurality of modified T cells and preserve desirable stem-like properties of the plurality of modified T cells. The primary human T cells can comprise resting primary human T cells. The present disclosure provides a population of modified T cell produced by the disclosed method. The present disclosure provides a method of administering the population of modified T cells comprising the transiently expressed CSR produced by the disclosed method. In one aspect, the present disclosure provides a method of administering the population of modified T cells produced by the disclosed method after the plurality of T cells no longer express the CSR. The present disclosure provides a method of administering the population of modified T cells comprising the transiently expressed CSR produced by the disclosed method to treat a disease or disorder. In one aspect, the present disclosure provides a method of administering the population of modified T cells produced by the disclosed method after the plurality of modified T cells no longer express the CSR to treat a disease or disorder.

[0210] The method of producing a modified T cell or producing a population of modified T cells can further comprise introducing a modification of an endogenous sequence encoding a T cell Receptor (TCR), wherein the modification reduces or eliminates a level of expression or activity of the TCR. The method of producing a modified T cell or producing a population of modified T cells can further comprise introducing a modification of an endogenous sequence encoding Beta-2-Microglobulin (B2M), wherein the modification reduces or eliminates a level of expression or activity of a major histocompatibility complex (MHC) class I (MHC-1). In some aspects, the method of producing a modified T cell or producing a population of modified T cells can further comprising introducing both a modification of an endogenous sequence encoding TCR, wherein the modification reduces or eliminates a level of expression or activity of the TCR and introducing a modification of an endogenous sequence encoding B2M, wherein the modification reduces or eliminates a level of expression or activity of MHC-1.

[0211] The method of producing a modified T cell or producing a population of modified T cells can further comprise introducing into the primary human T cell or plurality of primary human T cells a composition comprising an antigen receptor, a therapeutic protein or a sequence encoding the same. In one aspect, the antigen receptor is a non-naturally occurring antigen receptor. In a preferred aspect, the method of producing a modified T cell or producing a population of modified T cells can further comprise introducing into the primary human T cell or plurality of primary human T cells a composition comprising a Chimeric Antigen Receptor (CAR) or a sequence encoding the same. The method can further comprise introducing into the primary human T cell or plurality of primary human T cells a composition comprising an inducible proapoptotic polypeptide or a sequence encoding the same. The method of producing a modified T cell or producing a population of modified T cells can further comprise introducing into the primary human T cell or plurality of primary human T cells a composition comprising an antigen receptor, a therapeutic protein or a sequence encoding the same and a composition comprising an inducible proapoptotic polypeptide or a sequence encoding the same.

[0212] The method of producing a modified T cell or producing a population of modified T cells can further comprise contacting the modified T cell or population of modified T cells with an activator composition. The activator composition can comprise, consist essentially of, or consist of one or more agonists or activating agents that can bind a CSR activation component of the modified T cell or plurality of modified T cells. The agonist/activating agent can be naturally occurring or non-naturally occurring. In preferred aspects, the agonist/activating agent is an antibody or antibody fragment. The agonist/activating agent can be one or more of an anti-CD3 antibody or fragment thereof, an anti-CD2 antibody or fragment thereof, an anti-CD28 antibody or fragment thereof, or any combination thereof. In some aspects, the agonist/activating agent that can be one or more of an anti-human CD3 monospecific tetrameric antibody complex, an anti-human CD2 monospecific tetrameric antibody complex, an anti-human CD28 monospecific tetrameric antibody complex, or a combination thereof. The agonist/activating can contact the modified T cell or population of modified T cells in vitro, ex vivo or in vivo. In a preferred aspect, the agonist/activating activates the modified T cell or population of modified T cells, induces cell division in the modified T cell or population of modified T cells, increases cell division (e.g., cell doubling time) in the modified T cell or population of modified T cells, increases fold expansion in the modified T cell or population of modified T cells, or any combination thereof.

[0213] The present disclosure provides a method of expanding modified Treg cells within a population of modified T cells comprising, consisting essential of, or consisting of, introducing into a plurality of primary human T cells a composition comprising a Chimeric Stimulator Receptor (CSR) of the present disclosure or a sequence encoding the same to produce a plurality of modified T cells under conditions that stably express the CSR within the plurality of modified T cells and preserve desirable Treg properties of the plurality of modified T cells and culturing the modified T cells in the presence of an activator composition to produce a plurality of activated modified Treg cells, wherein expansion of the plurality of modified Treg cells is higher than the expansion of a plurality of Treg cells not stably expressing a CSR of the present disclosure under the same conditions.

[0214] In some aspects, a plurality is wherein at least 5%, at least 10%, at least 15%, at least 20%, at least 25%, at least 30%, at least 35%, at least 40%, at least 45%, at least 50%, at least 55%, at least 60%, at least 65%, at least 70%, at least 75%, at least 80%, at least 85%, at least 90%, at least 95%, at least 96%, at least 97%, at least 98%, at least 99%, or 100% or any percentage in between of the modified T cells are modified Treg cells.

[0215] Expansion of CSR expressing Treg cells can be wherein the total population of CSR expressing Treg cells increases by at least 5%, at least 10%, at least 15%, at least 20%, at least 25%, at least 30%, at least 35%, at least 40%, at least 45%, at least 50%, at least 55%, at least 60%, at least 65%, at least 70%, at least 75%, at least 80%, at least 85%, at least 90%, at least 95%, at least 96%, at least 97%, at least 98%, at least 99%, or 100% or any percentage in between in comparison to Treg cells not expressing the CSR under the same conditions. The expansion of CSR expressing Treg cells can be wherein the total population of CSR expressing Treg cells increase by 5% to 10%, 10% to 15%, 15% to 20%, 20% to 25%, 25% to 30%, 30% to 35%, 35% to 40%, 40% to 45%, 45% to 50%, 50% to 55%, 55% to 60%, 60% to 65%, 65% to 70%, 70% to 75%, 75% to 80%, 80% to 85%, 85% to 90%, 90% to 95% or 95% to 100% in comparison to Treg cells not expressing the CSR under the same conditions.

[0216] Expansion of CSR expressing Treg cells can be wherein the total population of CSR expressing Treg cells increases by at least 1.0 fold, at least 1.1 fold, at least 1.2 fold, at least 1.3 fold, at least 1.4 fold, at least 1.5 fold, at least 1.6 fold, at least 1.7 fold, at least 1.8 fold, at least 1.9 fold, at least 2 fold, at least 3 fold, at least 4 fold, at least 5 fold, at least 6 fold, at least 7 fold, at least 8 fold, at least 9 fold, at least 10 fold, at least 11 fold, at least 12 fold, at least 13 fold, at least 14 fold, at least 15 fold, at least 16 fold, at least 17 fold, at least 18 fold, at least 19 fold, at least 20 fold, at least 21 fold, at least 22 fold, at least 23 fold, at least 24 fold, at least 25 fold, at least 26 fold, at least 27 fold, at least 28 fold, at least 29 fold or at least 30 fold in comparison to Treg cells not expressing the CSR under the same conditions.

[0217] The present disclosure provides a method of expanding modified Treg cells within a population of modified T cells comprising, consisting essential of, or consisting of, introducing into a plurality of primary human T cells a composition comprising a Chimeric Stimulator Receptor (CSR) of the present disclosure or a sequence encoding the same to produce a plurality of modified T cells under conditions that transiently express the CSR within the plurality of modified T cells and preserve desirable Treg properties of the plurality of modified T cells, and culturing the modified T cells in the presence of an activator composition to produce a plurality of activated modified Treg cells, wherein expansion of the plurality of modified Treg cells is higher than the expansion of a plurality of Treg cells not transiently expressing a CSR of the present disclosure under the same conditions.

[0218] In some aspects, a plurality is wherein at least 5%, at least 10%, at least 15%, at least 20%, at least 25%, at least 30%, at least 35%, at least 40%, at least 45%, at least 50%, at least 55%, at least 60%, at least 65%, at least 70%, at least 75%, at least 80%, at least 85%, at least 90%, at least 95%, at least 96%, at least 97%, at least 98%, at least 99%, or 100% or any percentage in between of the modified T cells are modified Treg cells.

[0219] Expansion of CSR expressing Treg cells can be wherein the total population of CSR expressing Treg cells increases by at least 5%, at least 10%, at least 15%, at least 20%, at least 25%, at least 30%, at least 35%, at least 40%, at least 45%, at least 50%, at least 55%, at least 60%, at least 65%, at least 70%, at least 75%, at least 80%, at least 85%, at least 90%, at least 95%, at least 96%, at least 97%, at least 98%, at least 99%, or 100% or any percentage in between in comparison to Treg cells not expressing the CSR under the same conditions. The expansion of CSR expressing Treg cells can be wherein the total population of CSR expressing Treg cells increase by 5% to 10%, 10% to 15%, 15% to 20%, 20% to 25%, 25% to 30%, 30% to 35%, 35% to 40%, 40% to 45%, 45% to 50%, 50% to 55%, 55% to 60%, 60% to 65%, 65% to 70%, 70% to 75%, 75% to 80%, 80% to 85%, 85% to 90%, 90% to 95% or 95% to 100% or any percentage in between in comparison to Treg cells not expressing the CSR under the same conditions.

[0220] Expansion of CSR expressing Treg cells can be wherein the total population of CSR expressing Treg cells increases by at least 1.0 fold, at least 1.1 fold, at least 1.2 fold, at least 1.3 fold, at least 1.4 fold, at least 1.5 fold, at least 1.6 fold, at least 1.7 fold, at least 1.8 fold, at least 1.9 fold, at least 2 fold, at least 3 fold, at least 4 fold, at least 5 fold, at least 6 fold, at least 7 fold, at least 8 fold, at least 9 fold, at least 10 fold, at least 11 fold, at least 12 fold, at least 13 fold, at least 14 fold, at least 15 fold, at least 16 fold, at least 17 fold, at least 18 fold, at least 19 fold, at least 20 fold, at least 21 fold, at least 22 fold, at least 23 fold, at least 24 fold, at least 25 fold, at least 26 fold, at least 27 fold, at least 28 fold, at least 29 fold or at least 30 fold in comparison to Treg cells not expressing the CSR under the same conditions.

[0221] The activator composition of the methods of expanding a population of can comprise, consist essentially of, or consist of one or more agonists or activating agents that can bind a CSR activation component of the modified T cell or plurality of modified T cells. The agonist/activating agent can be naturally occurring or non-naturally occurring. Exemplary naturally occurring agonist/activating agents include but are not limited to CD2 ligands such as CD48, CD58 or CD59, or any combination thereof. CD2 ligands can be full length, partial insoluble or non-soluble form, monomeric or other, homogenous or heterologous. In preferred aspects, the agonist/activating agent is an antibody or antibody fragment. The agonist/activating agent can be one or more of an anti-CD3 antibody or fragment thereof, an anti-CD2 antibody or fragment thereof, an anti-CD28 antibody or fragment thereof, or any combination thereof. In some aspects, the agonist/activating agent that can be one or more of an anti-human CD3 monospecific tetrameric antibody complex, an anti-human CD2 monospecific tetrameric antibody complex, an anti-human CD28 monospecific tetrameric antibody complex, or a combination thereof.

[0222] The conditions can comprise culturing the modified T cell or plurality of modified T cells in a media comprising a sterol; an alkane; phosphorus and one or more of an octanoic acid, a palmitic acid, a linoleic acid, and an oleic acid. The culturing can be in vivo or ex vivo. The modified T cell can be an allogeneic T cell or the plurality of modified T cells can be allogeneic T cells. The modified T cell can be an autologous T cell or the plurality of modified T cells can be autologous T cells.

[0223] In some aspects, the media can comprise one or more of octanoic acid at a concentration of between 0.9 mg/kg to 90 mg/kg, inclusive of the endpoints; palmitic acid at a concentration of between 0.2 mg/kg to 20 mg/kg, inclusive of the endpoints; linoleic acid at a concentration of between 0.2 mg/kg to 20 mg/kg, inclusive of the endpoints; oleic acid at a concentration of 0.2 mg/kg to 20 mg/kg, inclusive of the endpoints; and a sterol at a concentration of about 0.1 mg/kg to 10 mg/kg, inclusive of the endpoints.

[0224] In some aspects, the media can comprise one or more of octanoic acid at a concentration of about 9 mg/kg, palmitic acid at a concentration of about 2 mg/kg, linoleic acid at a concentration of about 2 mg/kg, oleic acid at a concentration of about 2 mg/kg and a sterol at a concentration of about 1 mg/kg.

[0225] In some aspects, the media can comprise one or more of octanoic acid at a concentration of between 6.4 μmol/kg and 640 μmol/kg, inclusive of the endpoints; palmitic acid at a concentration of between 0.7 μmol/kg and 70 μmol/kg, inclusive of the endpoints; linoleic acid at a concentration of between 0.75 μmol/kg and 75 μmol/kg, inclusive of the endpoints; oleic acid at a concentration of between 0.75 μmol/kg and 75 μmol/kg, inclusive of the endpoints; and a sterol at a concentration of between 0.25 μmol/kg and 25 μmol/kg, inclusive of the endpoints.

[0226] In some aspects, the media can comprise one or more of octanoic acid at a concentration of about 64 μmol/kg, palmitic acid at a concentration of about 7 μmol/kg, linoleic acid at a concentration of about 7.5 μmol/kg, oleic acid at a concentration of about 7.5 μmol/kg and a sterol at a concentration of about 2.5 μmol/kg.

[0227] The present disclosure provides compositions comprising any modified T cell produced by a method disclosed herein. The present disclosure provides compositions comprising any population of modified T cell produced by a method disclosed herein. The present disclosure provides compositions comprising any modified T cell expanded by a method disclosed herein. The present disclosure provides compositions comprising any population of modified T cell expanded by a method disclosed herein.

[0228] The present disclosure provides compositions for use in the treatment of a disease or disorder disclosed herein or the use of a composition for the treatment of any disease or disorder disclosed herein. The present disclosure also provides methods of treating a disease or disorder comprising, consisting essential of, or consisting of administering to a subject in need thereof a therapeutically-effective amount of a composition disclosed herein and at least one non-naturally occurring molecule which binds to the activation component of a CSR disclosed herein. The compositions can comprise, consist essentially of or consist of any of the modified cells or populations of modified cells disclosed herein. Preferably, any of the modified T cells or CSR T cells disclosed herein. Any non-naturally occurring molecule capable of binding to the activation component of the CSR of the present disclosure and selectively transducing a signal upon binding can be administered. Preferably, the non-naturally occurring molecule is an non-naturally CSR agonist/activating agent for the activation component. The non-naturally occurring agonist/activating agent that can bind a CSR activation component can be any non-naturally occurring antibody or antibody fragment. The non-naturally occurring antibody or antibody fragment can be a non-naturally occurring anti-CD3 antibody or fragment thereof, an anti-CD2 antibody or fragment thereof, an anti-CD28 antibody or fragment thereof, or any combination thereof. In some aspects, the non-naturally occurring agonist/activating agent that can bind a CSR activation component can be one or more of an anti-human CD3 monospecific tetrameric antibody complex, an anti-human CD2 monospecific tetrameric antibody complex, an anti-human CD28 monospecific tetrameric antibody complex, or a combination thereof. In some aspects, the non-naturally occurring agonist/activating agent that can bind an activation component can be selected from the group consisting of anti-CD2 monoclonal antibody, BTI-322 (Przepiorka et al., Blood 92(11):4066-4071, 1998) and humanized anti-CD2 monoclonal antibody clone AFC-TAB-104 (Siplizumab)(Bissonnette et al. Arch. Dermatol. Res. 301(6):429-442, 2009). In some aspects, administration of non-naturally occurring molecule capable of binding to the activation component of the CSR stimulates cell division of the modified cells in vivo. Thus, the present disclosure provides a method of stimulating cell division of a modified cell of the present disclosure in vivo by administering a non-naturally CSR agonist/activating agent for the activation component to a subject harboring the modified cell of the present disclosure.

[0229] In some aspects, the disease or disorder is a cell proliferation disease or disorder. In some aspects, the cell proliferation disease or disorder is cancer. The cancer can be a solid tumor cancer or a hematologic cancer. In some aspects, the solid tumor is prostate cancer or breast cancer. In preferred aspects, the prostate cancer is castrate-resistant prostate cancer. In some aspects, the hematologic cancer is multiple myeloma.

[0230] The modified cells or population of modified cells comprised within the disclosed compositions can be cultured in vitro or ex vivo prior to administration to a subject in need thereof. The modified cells can be allogenic modified cells or autologous modified cells. In some aspects, the cells are allogeneic modified T cells or autologous modified T cells. In some aspects, the cells are allogeneic modified CAR T cells or autologous modified CAR T cells. In some aspects, the cells are allogeneic modified CAR T cells comprising a CSR of the present disclosure or autologous modified CAR T cells comprising a CSR of the present disclosure.

[0231] The modified cell compositions or the compositions comprising populations of modified cells can be administered to the patient by any means known in the art. In some aspects, the composition is administered by systemic administration. In some aspects, the composition is administered by intravenous administration. The intravenous administration can be in an intravenous injection or an intravenous infusion. In some aspects, the composition is administered by local administration. In some aspects, the composition is administered by an intraspinal, intracerebroventricular, intraocular or intraosseous injection or infusion.

[0232] The therapeutically effective amount can be a single dose or multiple doses of modified cell compositions or the compositions comprising populations of modified cells. In some aspects, the therapeutically effective dose is a single dose and wherein the allogeneic cells of the composition engraft and/or persist for a sufficient time to treat the disease or disorder. In some aspects, the single dose is one of at least 2, 5, 10, 15, 20, 25, 30, 35, 40, 45, 50, 55, 60, 65, 70, 75, 80, 85, 90, 95, 100 or any number of doses in between that are manufactured simultaneously

[0233] In some aspects, the uses and methods for the treatment of a disease or disorder further provide that subjects do not develop graft v host (GvH) disease, host v graft (HvG) disease, or a combination thereof, following administration of modified cell compositions disclosed herein or the compositions comprising populations of modified cells disclosed herein.

[0234] Allogeneic cells of the disclosure are engineered to prevent adverse reactions to engraftment following administration to a subject. Allogeneic cells may be any type of cell.

[0235] In some embodiments of the composition and methods of the disclosure, allogeneic cells are stem cells. In some embodiments, allogeneic cells are derived from stem cells. Exemplary stem cells include, but are not limited to, embryonic stem cells, adult stem cells, induced pluripotent stem cells (iPSCs), multipotent stem cells, pluripotent stem cells, and hematopoetic stem cells (HSCs).

[0236] In some embodiments of the composition and methods of the disclosure, allogeneic cells are differentiated somatic cells.

[0237] In some embodiments of the composition and methods of the disclosure, allogeneic cells are immune cells. In some embodiments, allogeneic cells are T lymphocytes (T cells). In some embodiments, allogeneic cells are T cells that do not express one or more components of a naturally-occurring T cell Receptor (TCR). In some embodiments, allogeneic cells are T cells that express a non-naturally occurring antigen receptor. Alternatively, or in addition, in some embodiments, allogeneic cells are T cells that express a non-naturally occurring Chimeric Stimulatory Receptor (CSR). In some embodiments, the non-naturally occurring CSR comprises or consists of a switch receptor. In some embodiments, the switch receptor comprises an extracellular domain, a transmembrane domain, and an intracellular domain. In some embodiments, the extracellular domain of the switch receptor binds to a TCR co-stimulatory molecule and transduces a signal to the intracellular space of the allogeneic cell that recapitulates TCR signaling or TCR co-stimulatory signaling.

[0238] Forkhead box P3 (FoxP3)

[0239] The disclosure provides compositions, methods of making and methods of using Tregs comprising a CSR with a persistent phenotype both ex vivo and when transplanted in a patient. In some embodiments, this persistent phenotype is due to the expression of forkhead box P3 (FoxP3) in a CD4+ T cell, Treg cell, CD4+ CAR-T cell, or CAR-Treg cell. In some embodiments, CD4+ T cells that are not Tregs can be genetically engineered into Tregs through the forced expression of FoxP3 using the methods and compositions of the disclosure. In some embodiments, FoxP3 can be encoded in a transgene with an inducible promoter, such that FoxP3 expression can be induced to create engineered Tregs or “forced Tregs”.

[0240] In some embodiments of the compositions and methods of the disclosure, the FoxP3 is wild-type (WT) FoxP3. Exemplary wild type human Foxp3 sequences are described in NP 054728.2, the contents of which are incorporated herein by reference. In some embodiments, the wild type FoxP3 comprises an amino acid sequence of having at least 80% identity, at least 90% identity, at least 95% identity, at least 99% identity or is identical to a sequence of

(SEQ ID NO: 80)

| | |
|---|---|
| 1 | MPNPRPGKPS APSLALGPSP GASPSWRAAP KASDLLGARG |
| | PGGTFQGRDL RGGAHASSSS |
| 61 | LNPMPPSQLQ LPTLPLVMVA PSGARLGPLP HLQALLQDRP |
| | HFMHQLSTVD AHARTPVLQV |
| 121 | HPLESPAMIS LTPPTTATGV FSLKARPGLP PGINVASLEW |
| | VSREPALLCT FPNPSAPRKD |
| 181 | STLSAVPQSS YPLLANGVCK WPGCEKVFEE PEDFLKHCQA |
| | DHLLDEKGRA QCLLQREMVQ |
| 241 | SLEQQLVLEK EKLSAMQAHL AGKMALTKAS SVASSDKGSC |
| | CIVAAGSQGP WPAWSGPRE |
| 301 | APDSLFAVRR HLWGSHGNST FPEFLHNMDY FKFHNMRPPF |
| | TYATLIRWAI LEAPEKQRTL |
| 361 | NEIYHWFTRM FAFFRNHPAT WKNAIRHNLS LHKCFVRVES |
| | EKGAVWTVDE LEFRKKRSQR |
| 421 | PSRCSNPTPG P. |

In some embodiments, the wild type FoxP3 comprises or consists essentially of SEQ ID NO: 80.

[0241] In some embodiments, the wild type FoxP3 is encoded by a nucleotide sequence having at least 80% identity, at least 90% identity, at least 95% identity, at least 99% identity or is identical to a sequence of

(SEQ ID NO: 81)

| | |
|---|---|
| 1 | atgcccaacc ccaggcctgg caagccctcg gccccttcct |
| | tggcccttgg cccatcccca |
| 61 | ggagcctcgc ccagctggag ggctgcaccc aaagcctcag |
| | acctgctggg ggcccggggc |
| 121 | ccagggggaa ccttccaggg ccgagatctt cgaggcgggg |
| | cccatgcctc ctcttcttcc |
| 181 | ttgaacccca tgccaccatc gcagctgcag ctgcccacac |
| | tgcccctagt catggtggca |
| 241 | ccctccgggg cacggctggg ccccttgccc cacttacagg |
| | cactcctcca ggacaggcca |
| 301 | catttcatgc accagctctc aacggtggat gcccacgccc |
| | ggacccctgt gctgcaggtg |
| 361 | caccccctgg agagcccagc catgatcagc ctcacaccac |
| | ccaccaccgc cactggggtc |
| 421 | ttctccctca aggcccggcc tggcctccca cctgggatca |
| | acgtggccag cctggaatgg |
| 481 | gtgtccaggg agccggcact gctctgcacc ttcccaaatc |
| | ccagtgcacc caggaaggac |
| 541 | agcacccttt cggctgtgcc ccagagctcc tacccactgc |
| | tggcaaatgg tgtctgcaag |
| 601 | tggcccggat gtgagaaggt cttcgaagag ccagaggact |
| | tcctcaagca ctgccaggcg |
| 661 | gaccatcttc tggatgagaa gggcagggca caatgtctcc |
| | tccagagaga gatggtacag |
| 721 | tctctggagc agcagctggt gctggagaag gagaagctga |
| | gtgccatgca ggcccacctg |
| 781 | gctgggaaaa tggcactgac caaggcttca tctgtggcat |
| | catccgacaa gggctcctgc |
| 841 | tgcatcgtag ctgctggcag ccaaggccct gtcgtcccag |
| | cctggtctgg cccccgggag |
| 901 | gcccctgaca gcctgtttgc tgtccggagg cacctgtggg |
| | gtagccatgg aaacagcaca |
| 961 | ttcccagagt tcctccacaa catggactac ttcaagttcc |
| | acaacatgcg accccctttc |
| 1021 | acctacgcca cgctcatccg ctgggccatc ctggaggctc |
| | cagagaagca gcggacactc |
| 1081 | aatgagatct accactggtt cacacgcatg tttgccttct |
| | tcagaaacca tcctgccacc |
| 1141 | tggaagaacg ccatccgcca caacctgagt ctgcacaagt |
| | gctttgtgcg ggtggagagc |
| 1201 | gagaaggggg ctgtgtggac cgtggatgag ctggagttcc |
| | gcaagaaacg gagccagagg |
| 1261 | cccagcaggt gttccaaccc tacacctggc ccc. |

### Chimeric Stimulatory Receptors (CSRs)

[0242] Adoptive cell compositions that are “universally” safe for administration to any patient requires a significant reduction or elimination of alloreactivity.

[0243] Towards this end, allogeneic cells of the disclosure are modified to interrupt expression or function of a T cell Receptor (TCR) and/or a class of Major Histocompatibility Complex (MHC). The TCR mediates graft vs host (GvH) reactions whereas the MHC mediates host vs graft (HvG) reactions. In preferred embodiments, any expression and/or function of the TCR is eliminated in allogeneic cells of the disclosure to prevent T cell mediated GvH that could cause death to the subject. Thus, in particularly preferred embodiments, the disclosure provides a pure TCR-negative allogeneic T cell composition (e.g., each cell of the composition expresses at a level so low as to either be undetectable or non-existent).

[0244] In preferred embodiments, expression and/or function of MEW class I (MHC-I, specifically, HLA-A, HLA-B, and HLA-C) is reduced or eliminated in allogeneic cells of the disclosure to prevent HvG and, consequently, to improve engraftment of allogeneic cells of the disclosure in a subject. Improved engraftment of the allogeneic cells of the disclosure results in longer persistence of the cells, and, therefore, a larger therapeutic window for the subject. Specifically, in the allogeneic cells of the disclosure, expression and/or function of a structural element of MHC-I, Beta-2-Microglobulin (B2M), is reduced or eliminated in allogeneic cells of the disclosure.

[0245] The above strategies for generating an allogeneic cell of the disclosure induce further challenges. T Cell Receptor (TCR) knockout (KO) in T cells results in loss of expression of CD3-zeta (CD3z or CD3ζ), which is part of the TCR complex. The loss of CD3λ in TCR-KO T cells dramatically reduces the ability of optimally activating and expanding these cells using standard stimulation/activation reagents, including, but not limited to, agonist anti-CD3 mAb. When the expression or function of any one component of the TCR complex is interrupted, all components of the complex are lost, including TCR-alpha (TCRα), TCR-beta (TCRβ), CD3-gamma (CD3γ), CD3-epsilon (CD3ε), CD3-delta (CD3 δ), and CD3-zeta (CD3ζ). Both CD3ε and CD3ζ are required for T cell activation and expansion. Agonist anti-CD3 mAbs typically recognize CD3ε and possibly another protein within the complex which, in turn, signals to CD3ζ. CD3ζ provides the primary stimulus for T cell activation (along with a secondary co-stimulatory signal) for optimal activation and expansion. Under normal conditions, full T cell activation depends on the engagement of the TCR in conjunction with a second signal mediated by one or more co-stimulatory receptors (e.g., CD28, CD2, 4-1BBL, etc. . . . ) that boost the immune response. However, when the TCR is not present, T cell expansion is severely reduced when stimulated using standard activation/stimulation reagents, including agonist anti-CD3 mAb. In fact, T cell expansion is reduced to only 20-40% of the normal level of expansion when stimulated using standard activation/stimulation reagents, including agonist anti-CD3 mAb.

[0246] The disclosure provides a Chimeric Stimulatory Receptor (CSR) to deliver CD3z primary stimulation to allogeneic T cells in the absence of an endogenous TCR (and, consequently, an endogenous CD3) when stimulated using standard activation/stimulation reagents, including agonist anti-CD3 mAb.

[0247] In the absence of an endogenous TCR, Chimeric Stimulatory Receptors (CSRs) of the disclosure provide a CD3 stimulus to enhance activation and expansion of allogeneic T cells. In other words, in the absence of an endogenous TCR, Chimeric Stimulatory Receptors (CSRs) of the disclosure rescue the allogeneic cell from an activation-based disadvantage when compared to non-allogeneic T cells that express an endogenous TCR. In some embodiments, CSRs of the disclosure comprise an agonist mAb epitope extracellularly and a CD3ζ stimulatory domain intracellularly and, functionally, convert an anti-CD28 or anti-CD2 binding event on the surface into a CD3z signaling event in an allogeneic T cell modified to express the CSR. In some embodiments, a CSR comprises a wild type CD28 or CD2 protein and a CD3z intracellular stimulation domain, to produce CD28z CSR and CD2z CSR, respectively. In preferred embodiments, CD28z CSR and/or CD2z CSR further express a non-naturally occurring antigen receptor and/or a therapeutic protein. In preferred embodiments, the non-naturally occurring antigen receptor comprises a Chimeric Antigen Receptor.

[0248] The data provided herein demonstrate that modified allogeneic T cells of the disclosure comprising/expressing a CSR of the disclosure improve or rescue, the expansion of allogeneic T cells that no longer express endogenous TCR when compared to those cells that do not comprise/express a CSR of the disclosure.

[0249] A wildtype/natural human CD28 protein (NCBI: CD28 HUMAN; UniProt/Swiss-Prot: P10747.1) comprises or consists of the amino acid sequence of:

(SEQ ID NO: 82)
MLRLLLALNLEPSIQVTGNKILVKQSPMLVAYDNAVNLSCKYSYNLFSRE
FRASLHKGLDSAVEVCVVYGNYSQQLQVYSKTGFNCDGKLGNESVTFYLQ
NLYVNQTDIYFCKIEVMYPPPYLDNEKSNGTIIHVKGKHLCPSPLFPGPS
KPFWVLVVVGGVLACYSLLVTVAFIIFWVRSKRSRLLHSDYMNMTPRRPG
PTRKHYQPYAPPRDFAAYRS

[0250] A nucleotide sequence encoding wildtype/natural CD28 protein (NCBI: CCDS2361.1) comprises or consists of the nucleotide sequence of:

(SEQ ID NO: 83)
ATGCTCAGGCTGCTCTTGGCTCTCAACTTATTCCCTTCAATTCAAGTAAC
AGGAAACAAGATTTTGGTGAAGCAGTCGCCCATGCTTGTAGCGTACGACA
ATGCGGTCAACCTTAGCTGCAAGTATTCCTACAATCTCTTCTCAAGGGAG
TTCCGGGCATCCCTTCACAAAGGACTGGATAGTGCTGTGGAAGTCTGTGT
TGTATATGGGAATTACTCCCAGCAGCTTCAGGTTTACTCAAAAACGGGGT
TCAACTGTGATGGGAAATTGGGCAATGAATCAGTGACATTCTACCTCCAG
AATTTGTATGTTAACCAAACAGATATTTACTTCTGCAAAATTGAAGTTAT
GTATCCTCCTCCTTACCTAGACAATGAGAAGAGCAATGGAACCATTATCC
ATGTGAAAGGGAAACACCTTTGTCCAAGTCCCCTATTTCCCGGACCTTCT
AAGCCCTTTTGGGTGCTGGTGGTGGTTGGTGGAGTCCTGGCTTGCTATAG
CTTGCTAGTAACAGTGGCCTTTATTATTTTCTGGGTGAGGAGTAAGAGGA
GCAGGCTCCTGCACAGTGACTACATGAACATGACTCCCCGCCGCCCCGGG
CCCACCCGCAAGCATTACCAGCCCTATGCCCCACCACGCGACTTCGCAGC
CTATCGCTCCTGA

[0251] An exemplary CSR CD28z protein of the disclosure comprises or consists of the amino acid sequence of (CD28 Signal peptide, CD28 Extracellular Domain, CD28 Transmembrane domain, CD28 Cytoplasmic Domain, CD3z Intracellular Domain):

(SEQ ID NO: 84)
MLRLLLALNLFPSIQVTGNKILVKQSPMLVAYDNAVNLSCKYSYNLFSREFRASLHKGLDSA
VEVCVVYGNYSQQLQVYSKTGFNCDGKLGNESVTFYLQNLYVNQTDIYFCKIEVMYPPPYLD
NEKSNGTIIHVKGKHLCPSPLFPGPSKPFWVLVVVGGYEACYSLLVTVAFIIFWV [symbol] [symbol] [symbol]
RVKFSRSADAPAYKQGQNQLYNELNLGR
REEYDVLDKRRGRDPEMGGKPRRKNPQEGLYNELQKDKMAEAYSEIGMKGERRRGKGHDGLY
QGLSTATKDTYDALHMQALPPR
CD28 Signal peptide:
(SEQ ID NO: 85)
MLRLLLALNLFPSIQVTG
CD28 Extracellular Domain:
(SEQ ID NO: 86)
NKILVKQSPMLVAYDNAVNLSCKYSYNLFSREFRASLHKGLDSAVEVCVVYGNYSQQLQVYS
KTGFNCDGKLGNESVTFYLQNLYVNQTDIYFCKIEVMYPPPYLDNEKSNGTIIHVKGKHLCP
SPLFPGPSKP
CD28 Transmembrane domain:
(SEQ ID NO: 87)
FWVLVVVGGVLACYSLLVTVAFIIFWV
CD28 Cytoplasmic Domain.
(SEQ ID NO: 88)
RSKRSRLLHSDYMNMTPRRPGPTRKHYQPYAPPRDFAAYRS
CD3z Intracellular Domain:
(SEQ ID NO: 5)
RVKFSRSADAPAYKQGQNQLYNELNLGRREEYDVLDKRRGRDPEMGGKPRRKNPQEGLYNEL
QKDKMAEAYSEIGMKGERRRGKGHDGLYQGLSTATKDTYDALHMQALPPR

[0252] An exemplary nucleotide sequence encoding a CSR CD28z protein of the disclosure comprises or consists of the nucleotide sequence of (CD28 Signal peptide, CD28 Extracellular Domain, CD28 Transmembrane domain, CD28 Cytoplasmic Domain, CD3z Intracellular Domain):

(SEQ ID NO: 89)
ATGCTGAGACTGCTGCTGGCCCTGAATCTGTTCCCCAGCATCCAAGTGACCGGCAACAAGAT
CCTGGTCAAGCAGAGCCCTATGCTGGTGGCCTACGACAACGCCGTGAACCTGAGCTGCAAGT
ACAGCTACAACCTGTTCAGCAGAGAGTTCCGGGCCAGCCTGCACAAAGGACTGGATTCTGCT
GTGGAAGTGTGCGTGGTGTACGGCAACTACAGCCAGCAGCTGCAGGTCTACAGCAAGACCGG
CTTCAACTGCGACGGCAAGCTGGGCAATGAGAGCGTGACCTTCTACCTGCAAAACCTGTACG
TGAACCAGACCGACATCTATTTCTGCAAGATCGAAGTGATGTACCCGCCTCCTTACCTGGAC
AACGAGAAGTCCAACGGCACCATCATCCACGTGAAGGGCAAGCACCTGTGTCCTTCTCCACT
GTTCCCCGGACCTAGCAAGCCTTTCTGGGTGCTCGTTGTTGTTGGCGGCGTGCTGGCCTGTT
ATAGCCTGCTGGTTACAGTGGCCTTCATCATCTTTTGGGTC

[symbol]

[symbol]

[symbol]

[symbol]

[symbol]

[symbol]

AGAGTGAAGTTCTCCAGATCCG
CCGATGCTCCCGCCTATAAGCAGGGCCAGAACCAGCTGTACAACGAGCTGAACCTGGGGAGA
AGAGAAGAGTACGATGTGCTGGACAAGCGGAGAGGCAGAGATCCTGAGATGGGCGGCAAGCC
CAGACGGAAGAATCCTCAAGAGGGCCTGTACAATGAACTGCAGAAAGACAAGATGGCCGAGG
CCTACAGCGAGATCGGAATGAAGGGCGAGCGCAGAAGAGGCAAGGGACACGATGGACTGTAC
CAGGGCCTGAGCACCGCCACCAAGGATACCTATGATGCCCTGCACATGCAGGCCCTGCCTCC
AAGA
CD28 Signal peptide:
(SEQ ID NO: 90)
ATGCTGAGACTGCTGCTGGCCCTGAATCTGTTCCCCAGCATCCAAGTGACCGGC
CD28 Extracellular Domain:
(SEQ ID NO: 91)
AACAAGATCCTGGTCAAGCAGAGCCCTATGCTGGTGGCCTACGACAACGCCGTGAACCTGAG
CTGCAAGTACAGCTACAACCTGTTCAGCAGAGAGTTCCGGGCCAGCCTGCACAAAGGACTGG
ATTCTGCTGTGGAAGTGTGCGTGGTGTACGGCAACTACAGCCAGCAGCTGCAGGTCTACAGC
AAGACCGGCTTCAACTGCGACGGCAAGCTGGGCAATGAGAGCGTGACCTTCTACCTGCAAAA
CCTGTACGTGAACCAGACCGACATCTATTTCTGCAAGATCGAAGTGATGTACCCGCCTCCTT
ACCTGGACAACGAGAAGTCCAACGGCACCATCATCCACGTGAAGGGCAAGCACCTGTGTCCT
TCTCCACTGTTCCCCGGACCTAGCAAGCCT
CD28 Transmembrane domain:
(SEQ ID NO: 92)
TTCTGGGTGCTCGTTGTTGTTGGCGGCGTGCTGGCCTGTTATAGCCTGCTGGTTACAGTGGC
CTTCATCATCTTTTGGGTC
CD28 Cytoplasmic Domain:
(SEQ ID NO: 93)
CGAAGCAAGCGGAGCCGGCTGCTGCACAGCGACTACATGAACATGACCCCTAGACGGCCCGG
ACCAACCAGAAAGCACTACCAGCCTTACGCTCCTCCTAGAGACTTCGCCGCCTACCGGTCC
CD3z Intracellular Domain:
(SEQ ID NO: 94)
AGAGTGAAGTTCTCCAGATCCGCCGATGCTCCCGCCTATAAGCAGGGCCAGAACCAGCTGTA
CAACGAGCTGAACCTGGGGAGAAGAGAAGAGTACGATGTGCTGGACAAGCGGAGAGGCAGAG
ATCCTGAGATGGGCGGCAAGCCCAGACGGAAGAATCCTCAAGAGGGCCTGTACAATGAACTG
CAGAAAGACAAGATGGCCGAGGCCTACAGCGAGATCGGAATGAAGGGCGAGCGCAGAAGAGG
CAAGGGACACGATGGACTGTACCAGGGCCTGAGCACCGCCACCAAGGATACCTATGATGCCC
TGCACATGCAGGCCCTGCCTCCAAGA

[0253] A wildtype/natural human CD2 protein (NCBI: CD2 HUMAN; UniProt/Swiss-Prot: P06729.2) comprises or consists of the amino acid sequence of:

(SEQ ID NO: 95)
MSFPCKFVASFLLIFNVSSKGAVSKEITNALETWGALGQDINLDIPSFQM
SDDIDDIKWEKTSDKKKIAQFRKEKETFKEKDTYKLFKNGTLKIKHLKTD
DQDIYKVSIYDTKGKNVLEKIFDLKIQERVSKPKISWTCINTTLTCEVMN
GTDPELNLYQDGKHLKLSQRVITHKWTTSLSAKFKCTAGNKVSKESSVEP
VSCPEKGLDIYLIIGICGGGSLLMVFVALLVFYITKRKKQRSRRNDEELE
TRAHRVATEERGRKPHQIPASTPQNPATSQHPPPPPGHRSQAPSHRPPPP
GHRVQHQPQKRPPAPSGTQVHQQKGPPLPRPRVQPKPPHGAAENSLSPSS
N

[0254] A nucleotide sequence encoding wildtype/natural CD2 protein (NCBI: CCDS889.1) comprises or consists of the nucleotide sequence of:

(SEQ ID NO: 96)
ATGAGCTTTCCATGTAAATTTGTAGCCAGCTTCCTTCTGATTTTCAATGT
TTCTTCCAAAGGTGCAGTCTCCAAAGAGATTACGAATGCCTTGGAAACCT
GGGGTGCCTTGGGTCAGGACATCAACTTGGAGATTCCTAGTTTTCAAATG
AGTGATGATATTGAGGATATAAAATGGGAAAAAACTTCAGACAAGAAAAA
GATTGCACAATTCAGAAAAGAGAAAGAGACTTTCAAGGAAAAAGATACAT
ATAAGCTATTTAAAAATGGAACTCTGAAAATTAAGCATCTGAAGACCGAT
GATCAGGATATCTACAAGGTATCAATATATGATACAAAAGGAAAAAATGT
GTTGGAAAAAATATTTGATTTGAAGATTCAAGAGAGGGTCTCAAAACCAA
AGATCTCCTGGAGTTGTATCAACACAACCCTGAGCTGTGAGGTAATGAAT
GGAACTGACCCCGAATTAAACCTGTATCAAGATGGGAAACATCTAAAACT
TTCTCAGAGGGTCATCACACACAAGTGGACCACCAGCCTGAGTGCAAAAT
TCAAGTGCACAGCAGGGAACAAAGTCAGCAAGGAATCCAGTGTCGAGCCT
GTCAGCTGTCCAGAGAAAGGTCTGGACATCTATCTCATCATTGGCATATG
TGGAGGAGGCAGCCTCTTGATGGTCTTTGTGGCACTGCTCGTTTTCTATA
TCACCAAAAGGAAAAAACAGAGGAGTCGGAGAAATGATGAGGAGCTGGAG
ACAAGAGCCCACAGAGTAGCTACTGAAGAAAGGGGCCGGAAGCCCCACCA
AATTCCAGCTTCAACCCCTCAGAATCCAGCAACTTCCCAACATCCTCCTC
CACCACCTGGTCATCGTTCCCAGGCACCTAGTCATCGTCCCCCGCCTCCT
GGACACCGTGTTCAGCACCAGCCTCAGAAGAGGCCTCCTGCTCCGTCGGG
CACACAAGTTCACCAGCAGAAAGGCCCGCCCCTCCCCAGACCTCGAGTTC
AGCCAAAACCTCCCCATGGGGCAGCAGAAAACTCATTGTCCCCTTCCTCT
AATTAA

[0255] An exemplary CSR CD2z protein of the disclosure comprises or consists of the amino acid sequence of (CD2 Signal peptide, CD2 Extracellular Domain, CD2 Transmembrane domain, CD2 Cytoplasmic Domain, CD3z Intracellular Domain):

(SEQ ID NO: 97)
MSFPCKFVASFLLIFNVSSKGAVSKEITNALETWGALGQDINLDIPSFQMSDDIDDIKWEKT
SDKKKIAQFRKEKETFKEKDTYKLFKNGTLKIKHLKTDDQDIYKVSIYDTKGKNVLEKIFDL
KIQERVSKPKISWTCINTTLTCEVMNGTDPELNLYQDGKHLKLSQRVITHKWTTSLSAKFKC
TAGNKVSKESSVEPVSCPEKGLDIYLIIGICGGGSLLMVFVALLVFYIT

[symbol]

[symbol]

[symbol]

[symbol]

[symbol]

[symbol]

RVKFSRSADAPAYKQGQNQLY
NELNLGRREEYDVLDKRRGRDPEMGGKPRRKNPQEGLYNELQKDKMAEAYSEIGMKGERRRG
KGHDGLYQGLSTATKDTYDALHMQALPPR
CD2 Signal peptide:
(SEQ ID NO: 9)
MSFPCKFVASFLLIFNVSSKGAVS
CD2 Extracellular Domain:
(SEQ ID NO: 1)
KEITNALETWGALGQDINLDIPSFQMSDDIDDIKWEKTSDKKKIAQFRKEKETFKEKDTYKL
FKNGTLKIKHLKTDDQDIYKVSIYDTKGKNVLEKIFDLKIQERVSKPKISWTCINTTLTCEV
MNGTDPELNLYQDGKHLKLSQRVITHKWTTSLSAKFKCTAGNKVSKESSVEPVSCPEKGLD
CD2 Transmembrane domain:
(SEQ ID NO: 14)
IYLIIGICGGGSLLMVFVALLVFYIT
CD2 Cytoplasmic Domain:
(SEQ ID NO: 98)
KRKKQRSRRNDEELETRAHRVATEERGRKPHQIPASTPQNPATSQHPPPPPGHRSQAPSHRP
PPPGHRVQHQPQKRPPAPSGTQVHQQKGPPLPRPRVQPKPPHGAAENSLSPSSN
CD3z Intracellular Domain:
(SEQ ID NO: 5)
RVKFSRSADAPAYKQGQNQLYNELNLGRREEYDVLDKRRGRDPEMGGKPRRKNPQEGLYNEL
QKDKMAEAYSEIGMKGERRRGKGHDGLYQGLSTATKDTYDALHMQALPPR

[0256] The present disclosure provides a non-naturally occurring CSR CD2 protein comprising, consisting essential of, or consisting of an amino acid sequence at least 80%, at least 85%, at least 90%, at least 91%, at least 92%, at least 93%, at least 94%, at least 95%, at least 96%, at least 97%, at least 98%, at least 99% or 100% identical to SEQ ID NO:97. The present disclosure provides a CD2 signal peptide comprising, consisting essential of, or consisting of an amino acid sequence at least 80%, at least 85%, at least 90%, at least 91%, at least 92%, at least 93%, at least 94%, at least 95%, at least 96%, at least 97%, at least 98%, at least 99% or 100% identical to SEQ ID NO:9. The present disclosure provides a CD2 extracellular domain comprising, consisting essential of, or consisting of an amino acid sequence at least 80%, at least 85%, at least 90%, at least 91%, at least 92%, at least 93%, at least 94%, at least 95%, at least 96%, at least 97%, at least 98%, at least 99% or 100% identical to SEQ ID NO: 1. The present disclosure provides a CD2 transmembrande domain comprising, consisting essential of, or consisting of an amino acid sequence at least 80%, at least 85%, at least 90%, at least 91%, at least 92%, at least 93%, at least 94%, at least 95%, at least 96%, at least 97%, at least 98%, at least 99% or 100% identical to SEQ ID NO:14. The present disclosure provides a CD2 cytoplasmic domain comprising, consisting essential of, or consisting of an amino acid sequence at least 80%, at least 85%, at least 90%, at least 91%, at least 92%, at least 93%, at least 94%, at least 95%, at least 96%, at least 97%, at least 98%, at least 99% or 100% identical to SEQ ID NO:98. The present disclosure provides a CD3z intracellular domain comprising, consisting essential of, or consisting of an amino acid sequence at least 80%, at least 85%, at least 90%, at least 91%, at least 92%, at least 93%, at least 94%, at least 95%, at least 96%, at least 97%, at least 98%, at least 99% or 100% identical to SEQ ID NO:5.

[0257] An exemplary nucleotide sequence encoding a CSR CD2z protein of the disclosure comprises or consists of the amino acid sequence of (CD2 Signal peptide, CD2 Extracellular Domain, CD2 Transmembrane domain, CD2 Cytoplasmic Domain, CD3z Intracellular Domain):

(SEQ ID NO: 99)
ATGAGCTTCCCTTGCAAGTTCGTGGCCAGCTTCCTGCTGATCTTCAACGTGTCCTCTAAGGG
CGCCGTGTCCAAAGAGATCACAAACGCCCTGGAAACCTGGGGAGCCCTCGGCCAGGATATTA
ACCTGGACATCCCCAGCTTCCAGATGAGCGACGACATCGATGACATCAAGTGGGAGAAAACC
AGCGACAAGAAGAAGATCGCCCAGTTCCGGAAAGAGAAAGAGACATTCAAAGAGAAGGACAC
CTACAAGCTGTTCAAGAACGGCACCCTGAAGATCAAGCACCTGAAAACCGACGACCAGGACA
TCTATAAGGTGTCCATCTACGACACCAAGGGCAAGAACGTGCTGGAAAAGATCTTCGACCTC
AAGATCCAAGAGCGGGTGTCCAAGCCTAAGATCAGCTGGACCTGCATCAACACCACACTGAC
CTGCGAAGTGATGAACGGCACAGACCCCGAGCTGAACCTGTACCAGGATGGCAAACACCTGA
AGCTGAGCCAGCGCGTGATCACCCACAAGTGGACAACAAGCCTGAGCGCCAAGTTCAAGTGC
ACCGCCGGAAACAAAGTGTCTAAAGAGTCCAGCGTCGAGCCCGTGTCTTGCCCTGAAAAAGG
ACTGGACATCTACCTGATCATCGGCATCTGTGGCGGCGGAAGCCTGCTGATGGTGTTTGTGG
CTCTGCTGGTGTTCTAGATCACC

[symbol]

[symbol]

[symbol]

[symbol]

[symbol]

[symbol]

[symbol]

[symbol]

[symbol]

[symbol]

[symbol]

[symbol]

[symbol]

[symbol]

[symbol]

[symbol]

[symbol]

GAGTGAAGTTCAGCCGCAGCGCCGATGCTCCTGCCTATAAGCAGGGACAGAACCAGCTGTAC
AACGAGCTGAATCTGGGGCGCAGAGAAGAGTACGATGTGCTGGACAAGCGGAGAGGCAGAGA
TCCTGAGATGGGCGGCAAGCCCAGACGGAAGAATCCTCAAGAGGGCCTGTATAATGAGCTGC
AGAAAGACAAGATGGCCGAGGCCTACAGCGAGATCGGAATGAAGGGCGAGCGCAGAAGAGGC
AAGGGACACGATGGACTGTATCAGGGCCTGAGCACCGCCACCAAGGATACCTATGATGCCCT
GCACATGCAGGCCCTGCCTCCAAGA
CD2 Signal peptide:
(SEQ ID NO: 100)
ATGAGCTTCCCTTGCAAGTTCGTGGCCAGCTTCCTGCTGATCTTCAACGTGTCCTCTAAGGG
CGCCGTGTCC
CD2 Extracellular Domain:
(SEQ ID NO: 101)
AAAGAGATCACAAACGCCCTGGAAACCTGGGGAGCCCTCGGCCAGGATATTAACCTGGACAT
CCCCAGCTTCCAGATGAGCGACGACATCGATGACATCAAGTGGGAGAAAACCAGCGACAAGA
AGAAGATCGCCGAGTTCCGGAAAGAGAAAGAGACATTCAAAGAGAAGGAGACCTACAAGCTG
TTCAAGAACGGCACCCTGAAGATCAAGCACCTGAAAACCGACGACCAGGACATCTATAAGGT
GTCCATCTACGACACCAAGGGCAAGAACGTGCTGGAAAAGATCTTCGACCTCAAGATCCAAG
AGCGGGTGTCCAAGCCTAAGATCAGCTGGACCTGCATCAACACCACACTGACCTGCGAAGTG
ATGAACGGCACAGACCCCGAGCTGAACCTGTACCAGGATGGCAAACACCTGAAGCTGAGCCA
GCGCGTGATCACCCACAAGTGGACAACAAGCCTGAGCGCCAAGTTCAAGTGCACCGCCGGAA
ACAAAGTGTCTAAAGAGTCCAGCGTCGAGCCCGTGTCTTGCCCTGAAAAAGGACTGGAC
CD2 Transmembrane domain:
(SEQ ID NO: 102)
ATCTACCTGATCATCGGCATCTGTGGCGGCGGAAGCCTGCTGATGGTGTTTGTGGCTCTGCT
GGTGTTCTACATCACC
CD2 Cytoplasmic Domain:
(SEQ ID NO: 103)
AAGCGGAAGAAGCAGCGGAGCAGACGGAACGACGAGGAACTGGAAACACGGGCCCATAGAGT
GGCCACCGAGGAAAGAGGCAGAAAGCCCCACCAGATTCCAGCCAGCACACCCCAGAATCCTG
CCACCTCTCAACACCCTCCACCTCCACCTGGACACAGATCTCAGGCCCCATCTCACAGACCT
CCACCACCTGGTCATCGGGTGCAGCACCAGCCTCAGAAAAGACCTCCTGCTCCTAGCGGCAC
ACAGGTGCACCAGCAAAAAGGACCTCCACTGCCTCGGCCTAGAGTGCAGCCTAAACCTCCTC
ATGGCGCCGCTGAGAACAGCCTGTCTCCAAGCAGCAAC
CD3z Intracellular Domain:
(SEQ ID NO: 94)
AGAGTGAAGTTCAGCCGCAGCGCCGATGCTCCTGCCTATAAGCAGGGACAGAACCAGCTGTA
CAACGAGCTGAATCTGGGGCGCAGAGAAGAGTACGATGTGCTGGACAAGCGGAGAGGCAGAG
ATCCTGAGATGGGCGGCAAGCCCAGACGGAAGAATCCTCAAGAGGGCCTGTATAATGAGCTG
CAGAAAGACAAGATGGCCGAGGCCTACAGCGAGATCGGAATGAAGGGCGAGCGCAGAAGAGG
CAAGGGACACGATGGACTGTATCAGGGCCTGAGCACCGCCACCAAGGATACCTATGATGCCC
TGCACATGCAGGCCCTGCCTCCAAGA

[0258] An exemplary mutant CSR CD2z-D111H protein of the disclosure comprises or consists of the amino acid sequence of (CD2 Signal peptide, CD2 Extracellular domain with D111H mutation within the CD2 Extracellular domain, CD2 Transmembrane domain, CD2 Cytoplasmic domain, CD3z Intracellular domain):

(SEQ ID NO: 104)
MSFPCKFVASFLLIFNVSSKGAVSKEITNALETWGALGQDINLDTPSFQMSDDIDDTKWEKT
SDKKKIAQFRKEKETFKEKDTYKLFKNGTLKIKHLKTDDQDIYKVSIYHTKGKNVLEKIFDL
KIQERVSKPKISWTCINTTLTCEVMNGTDPELNLYQDGKHLKLSQRVITHKWTTSLSAKFKC
TAGNKVSKESSVEPVSCPEKGLDIYLIIGICGGGSLLMVFVALLVFYIT

[symbol]

[symbol]

[symbol]

[symbol]

[symbol]

[symbol]

RVKFSRSADAPAYKQGQNQLY
NELNLGRREEYDVLDKRRGRDPEMGGKPRRKNPQEGLYNELQKDKMAEAYSEIGMKGERRRG
KGHDGLYQGLSTATKDTYDALHMQALPPR
CD2 Signal peptide:
(SEQ ID NO: 9)
MSFPCKFVASELLIFNVSSKGAVS
CD2 Extracellular domain with D111H mutation within the CD2 Extracellular domain:
(SEQ ID NO: 4)
KEITNALETWGALGQDINLDIPSFQMSDDIDDIKWEKTSDKKKIAQFRKEKETFKEKDTYKL
FKNGTLKIKHLKTDDQDIYKVSIYHTKGKNVLEKIFDLKIQERVSKPKISWTCINTTLTCEV
MNGTDPELNLYQDGKHLKLSQRVITHKWTTSLSAKFKCTAGNKVSKESSVEPVSCPEKGL
CD2 Transmembrane domain:
(SEQ ID NO: 14)
IYLIIGICGGGSLLMVFVALLVFYIT
CD2 Cytoplasmic domain:
(SEQ ID NO: 98)
KRKKQRSRRNDEELETRAHRVATEERGRKPHQIPASTPQNPATSQHPPPPPGHRSQAPSHRP
PPPGHRVQHQPQKRPPAPSGTQVHQQKGPPLPRPRVQPKPPHGAAENSLSPSSN
CD3z Intracellular domain:
(SEQ ID NO: 5)
RVKFSRSADAPAYKQGQNQLYNELNLGRREEYDVLDKRRGRDPEMGGKPRRKNPQEGLYNEL
QKDKMAEAYSEIGMKGERRRGKGHDGLYQGLSTATKDTYDALHMQALPPR

[0259] The present disclosure provides a non-naturally occurring CSR CD2 protein comprising, consisting essential of, or consisting of an amino acid sequence at least 80%, at least 85%, at least 90%, at least 91%, at least 92%, at least 93%, at least 94%, at least 95%, at least 96%, at least 97%, at least 98%, at least 99% or 100% identical to SEQ ID NO:104. The present disclosure provides a CD2 extracellular domain comprising, consisting essential of, or consisting of an amino acid sequence at least 80%, at least 85%, at least 90%, at least 91%, at least 92%, at least 93%, at least 94%, at least 95%, at least 96%, at least 97%, at least 98%, at least 99% or 100% identical to SEQ ID NO:4.

[0260] An exemplary nucleotide sequence encoding a mutant CSR CD2z-D111H protein of the disclosure comprises or consists of the amino acid sequence of (CD2 Signal peptide, CD2 Extracellular domain with D111H mutation within the CD2 Extracellular domain, CD2 Transmembrane domain, CD2 Cytoplasmic domain, CD3z Intracellular domain):

(SEQ ID NO: 105)
ATGAGCTTCCCTTGCAAGTTCGTGGCCAGCTTCCTGCTGATCTTCAACGTGTCCTCTAAGGG
CGCCGTGTCCAAAGAGATCACAAACGCCCTGGAAACCTGGGGAGCCCTCGGCCAGGATATTA
ACCTGGACATCCCCAGCTTCCAGATGAGCGACGACATCGATGACATCAAGTGGGAGAAAACC
AGCGACAAGAAGAAGATCGCCCAGTTCCGGAAAGAGAAAGAGACATTCAAAGAGAAGGACAC
CTACAAGCTGTTCAAGAACGGCACCCTGAAGATCAAGCACCTGAAAACCGACGACCAGGACA
TCTATAAGGTGTCCATCTACCACACCAAGGGCAAGAACGTGCTGGAAAAGATCTTCGACCTC
AAGATCCAAGAGCGGGTGTCCAAGCCTAAGATCAGCTGGACCTGCATCAACACCACACTGAC
CTGCGAAGTGATGAACGGCACAGACCCCGAGCTGAACCTGTACCAGGATGGCAAACACCTGA
AGCTGAGCCAGCGCGTGATCACCCACAAGTGGACAACAAGCCTGAGCGCCAAGTTCAAGTGC
ACCGCCGGAAACAAAGTGTCTAAAGAGTCCAGCGTCGAGCCCGTGTCTTGCCCTGAAAAAGG
ACTGGACATCTACCTGATCATCGGCATCTGTGGCGGCGGAAGCCTGCTGATGGTGTTTGTGG
CTCTGCTGGTGTTCTAGATCACC

[symbol]

[symbol]

[symbol]

[symbol]

[symbol]

[symbol]

[symbol]

[symbol]

[symbol]

[symbol]

[symbol]

[symbol]

[symbol]

[symbol]

[symbol]

[symbol]

[symbol]

GAGTGAAGTTCAGCCGCAGCGCCGATGCTCCTGCCTATAAGCAGGGACAGAACCAGCTGTAC
AACGAGCTGAATCTGGGGCGCAGAGAAGAGTACGATGTGCTGGACAAGCGGAGAGGCAGAGA
TCCTGAGATGGGCGGCAAGCCCAGACGGAAGAATCCTCAAGAGGGCCTGTATAATGAGCTGC
AGAAAGACAAGATGGCCGAGGCCTACAGCGAGATCGGAATGAAGGGCGAGCGCAGAAGAGGC
AAGGGACACGATGGACTGTATCAGGGCCTGAGCACCGCCACCAAGGATACCTATGATGCCCT
GCACATGCAGGCCCTGCCTCCAAGA
CD2 Signal peptide:
(SEQ ID NO: 100)
ATGAGCTTCCCTTGCAAGTTCGTGGCCAGCTTCCTGCTGATCTTCAACGTGTCCTCTAAGGG
CGCCGTGTCC
CD2 Extracellular domain with D111H mutation within the CD2 Extracellular domain:
(SEQ ID NO: 106)
AAAGAGATCACAAACGCCCTGGAAACCTGGGGAGCCCTCGGCCAGGATATTAACCTGGACAT
CCCCAGCTTCCAGATGAGCGACGACATCGATGACATCAAGTGGGAGAAAACCAGCGACAAGA
AGAAGATCGCCGAGTTCCGGAAAGAGAAAGAGACATTCAAAGAGAAGGAGACCTACAAGCTG
TTCAAGAACGGCACCCTGAAGATCAAGCACCTGAAAACCGACGACCAGGACATCTATAAGGT
GTCCATCTACCACACCAAGGGCAAGAACGTGCTGGAAAAGATCTTCGACCTCAAGATCCAAG
AGCGGGTGTCCAAGCCTAAGATCAGCTGGACCTGCATCAACACCACACTGACCTGCGAAGTG
ATGAACGGCACAGACCCCGAGCTGAACCTGTACCAGGATGGCAAACACCTGAAGCTGAGCCA
GCGCGTGATCACCCACAAGTGGACAACAAGCCTGAGCGCCAAGTTCAAGTGCACCGCCGGAA
ACAAAGTGTCTAAAGAGTCCAGCGTCGAGCCCGTGTCTTGCCCTGAAAAAGGACTGGAC
CD2 Transmembrane domain:
(SEQ ID NO: 102)
ATCTACCTGATCATCGGCATCTGTGGCGGCGGAAGCCTGCTGATGGTGTTTGTGGCTCTGCT
GGTGTTCTACATCACC
CD2 Cytoplasmic domain:
(SEQ ID NO: 103)
AAGCGGAAGAAGCAGCGGAGCAGACGGAACGACGAGGAACTGGAAACACGGGCCCATAGAGT
GGCCACCGAGGAAAGAGGCAGAAAGCCCCACCAGATTCCAGCCAGCACACCCCAGAATCCTG
CCACCTCTCAACACCCTCCACCTCCACCTGGACACAGATCTCAGGCCCCATCTCACAGACCT
CCACCACCTGGTCATCGGGTGCAGCACCAGCCTCAGAAAAGACCTCCTGCTCCTAGCGGCAC
ACAGGTGCACCAGCAAAAAGGACCTCCACTGCCTCGGCCTAGAGTGCAGCCTAAACCTCCTC
ATGGCGCCGCTGAGAACAGCCTGTCTCCAAGCAGCAAC
CD3z Intracellular domain:
(SEQ ID NO: 94)
AGAGTGAAGTTCAGCCGCAGCGCCGATGCTCCTGCCTATAAGCAGGGACAGAACCAGCTGTA
CAACGAGCTGAATCTGGGGCGCAGAGAAGAGTACGATGTGCTGGACAAGCGGAGAGGCAGAG
ATCCTGAGATGGGCGGCAAGCCCAGACGGAAGAATCCTCAAGAGGGCCTGTATAATGAGCTG
CAGAAAGACAAGATGGCCGAGGCCTACAGCGAGATCGGAATGAAGGGCGAGCGCAGAAGAGG
CAAGGGACACGATGGACTGTATCAGGGCCTGAGCACCGCCACCAAGGATACCTATGATGCCC
TGCACATGCAGGCCCTGCCTCCAAGA

[0261] An exemplary mutant “CSR 01 CD2.DH.z” or “CD2z.V2” protein of the disclosure comprises or consists of the amino acid sequence of (CD2 Signal peptide, CD2 Extracellular domain with D111H mutation within the CD2 Extracellular domain, CD2 Transmembrane domain, CD2 Intracellular domain, CD3z Intracellular domain):

(SEQ ID NO: 107)
MSFPCKFVASFLLIFNVSSKGAVSKEITNALETWGALGQDINLDTPSFQMSDDIDDTKWEKT
SDKKKIAQFRKEKETFKEKDTYKLFKNGTLKIKHLKTDDQDIYKVSIYHTKGKNVLEKIFDL
KIQERVSKPKISWTCINTTLTCEVMNGTDPELNLYQDGKHLKLSQRVITHKWTTSLSAKFKC
TAGNKVSKESSVEPVSCPEKGLDIYLIIGICGGGSLLMVFVALLVFYIT

[symbol]

[symbol]

[symbol]

[symbol]

[symbol]

[symbol]

RVKFSRSADAPAYKQGQNQLY
NELNLGRREEYDVLDKRRGRDPEMGGKPRRKNPQEGLYNELQKDKMAEAYSEIGMKGERRRG
KGHDGLYQGLSTATKDTYDALHMQALPPR
CD2 Signal peptide:
(SEQ ID NO: 9)
CD2 Extracellular domain with D111H mutation within the CD2 Extracellular domain:
(SEQ ID NO: 4)
CD2 Transmembrane domain:
(SEQ ID NO: 14)
CD2 Intracellular domain:
(SEQ ID NO: 98)
CD3z Intracellular domain:
(SEQ ID NO: 5)

[0262] An exemplary nucleotide sequence encoding a mutant “CSR 01 CD2.DH.z” or “CD2z.V2” protein of the disclosure comprises or consists of the nucleotide sequence of (CD2 Signal peptide, CD2 Extracellular domain with D111H mutation within the CD2 Extracellular domain, CD2 Transmembrane domain, CD2 Intracellular domain, CD3z Intracellular domain):

(SEQ ID NO: 108)
ATGAGCTTCCCTTGCAAGTTCGTGGCCAGCTTCCTGCTGATCTTCAACGTGTCCTCTAAGGG
CGCCGTGTCCAAAGAAATCACGAATGCATTGGAAACCTGGGGAGCCCTCGGCCAGGATATTA
ACCTGGACATCCCCAGCTTCCAGATGAGCGACGACATCGATGACATCAAGTGGGAGAAAACC
AGCGACAAGAAGAAGATCGCCCAGTTCCGGAAAGAGAAAGAGACATTCAAAGAGAAGGACAC
CTACAAGCTGTTCAAGAACGGCACCCTGAAGATCAAGCACCTGAAAACCGACGACCAGGACA
TCTATAAGGTGTCCATCTACCACACCAAGGGCAAGAACGTGCTGGAAAAGATCTTCGACCTC
AAGATCCAAGAGCGGGTGTCCAAGCCTAAGATCAGCTGGACCTGCATCAACACCACACTGAC
CTGCGAAGTGATGAACGGCACAGACCCCGAGCTGAACCTGTACCAGGATGGCAAACACCTGA
AGCTGAGCCAGCGCGTGATCACCCACAAGTGGACAACAAGCCTGAGCGCCAAGTTCAAGTGC
ACCGCCGGAAACAAAGTGTCTAAAGAGTCCAGCGTCGAGCCCGTGTCTTGCCCTGAAAAAGG
ACTGGACATCTACCTGATCATCGGCATCTGTGGCGGCGGATCCCTGCTGATGGTGTTTGTGG
CTCTGCTGGTGTTCTACATCACC

[symbol]

[symbol]

[symbol]

[symbol]

[symbol]

[symbol]

[symbol]

[symbol]

[symbol]

[symbol]

[symbol]

[symbol]

[symbol]

[symbol]

[symbol]

[symbol]

[symbol]

GAGTGAAATTCAGCCGCAGCGCCGATGCTCCTGCCTATAAGCAGGGACAGAACCAGCTGTAC
AACGAGCTGAATCTGGGGCGCAGAGAAGAGTACGATGTGCTGGACAAGCGGAGAGGCAGAGA
TCCTGAGATGGGCGGCAAGCCCAGACGGAAGAATCCTCAAGAGGGCCTGTATAATGAGCTGC
AGAAAGACAAGATGGCCGAGGCCTACAGCGAGATCGGAATGAAGGGCGAGCGCAGAAGAGGC
AAGGGACACGATGGACTGTATCAGGGCCTGAGCACCGCCACCAAGGATACCTATGATGCCCT
GCACATGCAGGCCCTGCCTCCAAGA
CD2 Signal peptide:
(SEQ ID NO: 100)
CD2 Extracellular domain with D111H mutation within the CD2 Extracellular domain:
(SEQ ID NO: 106)
CD2 Transmembrane domain:
(SEQ ID NO: 102)
CD2 Intracellular domain:
(SEQ ID NO: 103)
CD3z Intracellular domain:
(SEQ ID NO: 94)

[0263] An exemplary mutant CSR 01b CD2.8.DH.z protein of the disclosure comprises or consists of the amino acid sequence of (CD8a Signal peptide, CD2 Extracellular domain with D111H mutation within the CD2 Extracellular domain, CD2 Transmembrane domain, CD2 Intracellular domain, CD3z Intracellular domain):

(SEQ ID NO: 109)
MALPVTALLLPLALLLHAARPKEITNALETWGALGQDINLDIPSFQMSDDIDDIKWEKTSDK
KKIAQFRKEKETFKEKDTYKLFKNGTLKIKHLKTDDQDIYKVSIYHTKGKNVLEKIFDLKIQ
ERVSKPKISWTCINTTLTCEVMNGTDPELNLYQDGKHLKLSQRVITHKWTTSLSAKFKCTAG
NKVSKESSVEPVSCPEKGLDIYLIIGICGGGSLLMVFVALLVFYIT

[symbol]

[symbol]

[symbol]

[symbol]

[symbol]

[symbol]

RVKFSRSADAPAYKQGQNQLYNEL
NLGRREEYDVLDKRRGRDPEMGGKPRRKNPQEGLYNELQKDKMAEAYSEIGMKGERRRGKGH
DGLYQGLSTATKDTYDALHMQALPPR
CD8a Signal peptide:
(SEQ ID NO: 12)
CD2 Extracellular domain with D111H mutation within the CD2 Extracellular domain:
(SEQ ID NO: 4)
CD2 Transmembrane domain:
(SEQ ID NO: 14)
CD2 Intracellular domain:
(SEQ ID NO: 98)
CD3z Intracellular domain:
(SEQ ID NO: 5)

[0264] An exemplary nucleotide sequence encoding a mutant CSR 01b CD2.8.DH.z protein of the disclosure comprises or consists of the nucleotide sequence of (CD8a Signal peptide, CD2 Extracellular domain with D111H mutation within the CD2 Extracellular domain, CD2 Transmembrane domain, CD2 Intracellular domain, CD3z Intracellular domain):

(SEQ ID NO: 110)
ATGGCTCTGCCTGTGACAGCTCTGCTGCTGCCTCTGGCTCTGCTTCTGCATGCCGCCAGACC
TAAAGAAATCACGAATGCATTGGAAACCTGGGGAGCCCTCGGCCAGGATATTAACCTGGACA
TCCCCAGCTTCCAGATGAGCGACGACATCGATGACATCAAGTGGGAGAAAACCAGCGACAAG
AAGAAGATCGCCCAGTTCCGGAAAGAGAAAGAGACATTCAAAGAGAAGGACACCTACAAGCT
GTTCAAGAACGGCACCCTGAAGATCAAGCACCTGAAAACCGACGACCAGGACATCTATAAGG
TGTCCATCTACCACACCAAGGGCAAGAACGTGCTGGAAAAGATCTTCGACCTCAAGATCCAA
GAGCGGGTGTCCAAGCCTAAGATCAGCTGGACCTGCATCAACACCACACTGACCTGCGAAGT
GATGAACGGCACAGACCCCGAGCTGAACCTGTACCAGGATGGCAAACACCTGAAGCTGAGCC
AGCGCGTGATCACCCACAAGTGGACAACAAGCCTGAGCGCCAAGTTCAAGTGCACCGCCGGA
AACAAAGTGTCTAAAGAGTCCAGCGTCGAGCCCGTGTCTTGCCCTGAAAAAGGACTGGACAT
CTACCTGATCATCGGCATCTGTGGCGGCGGATCCCTGCTGATGGTGTTTGTGGCTCTGCTGG
TGTTCTACATCACC

[symbol]

[symbol]

[symbol]

[symbol]

[symbol]

[symbol]

[symbol]

[symbol]

[symbol]

[symbol]

[symbol]

[symbol]

[symbol]

[symbol]

[symbol]

[symbol]

[symbol]

[symbol]

AGAGTGAAAT
TCAGCCGCAGCGCCGATGCTCCTGCCTATAAGCAGGGACAGAACCAGCTGTACAACGAGCTG
AATCTGGGGCGCAGAGAAGAGTACGATGTGCTGGACAAGCGGAGAGGCAGAGATCCTGAGAT
GGGCGGCAAGCCCAGACGGAAGAATCCTCAAGAGGGCCTGTATAATGAGCTGCAGAAAGACA
AGATGGCCGAGGCCTACAGCGAGATCGGAATGAAGGGCGAGCGCAGAAGAGGCAAGGGACAC
GATGGACTGTATCAGGGCCTGAGCACCGCCACCAAGGATACCTATGATGCCCTGCACATGCA
GGCCCTGCCTCCAAGA
CD8a Signal peptide:
(SEQ ID NO: 111)
ATGGCTCTGCCTGTGACAGCTCTGCTGCTGCCTCTGGCTCTGCTTCTGCATGCCGCCAGACC
T
CD2 Extracellular domain with D111H mutation within the CD2 Extracellular domain:
(SEQ ID NO: 106)
CD2 Transmembrane domain:
(SEQ ID NO: 102)
CD2 Intracellular domain:
(SEQ ID NO: 103)
CD3z Intracellular domain:
(SEQ ID NO: 94)

[0265] An exemplary mutant CSR 02 CD2.DH.28z protein of the disclosure comprises or consists of the amino acid sequence of (CD2 Signal peptide, CD2 Extracellular domain with D111H mutation within the CD2 Extracellular domain, CD2 Transmembrane domain, CD28 Intracellular domain, CD3z Intracellular domain):

(SEQ ID NO: 112)
MSFPCKFVASFLLIFNVSSKGAVSKEITNALETWGALGQDINLDTPSFQMSDDIDDIKWEKT
SDKKKIAQFRKEKETFKEKDTYKLFKNGTLKIKHLKTDDQDIYKVSIYHTKGKNVLEKIFDL
KIQERVSKPKISWTCINTTLTCEVMNGTDPELNLYQDGKHLKLSQRVITHKWTTSLSAKFKC
TAGNKVSKESSVEPVSCPEKGLDIYLIIGICGGGSLLMVFVALLVFYIT [symbol] [symbol] [symbol]
RVKFSRSADAPAYKQGQNQLYNELNLGRREEYDV
LDKRRGRDPEMGGKPRRKNPQEGLYNELQKDKMAEAYSEIGMKGERRRGKGHDGLYQGLSTA
TKDTYDALHMQALPPR
CD2 Signal peptide:
(SEQ ID NO: 9)
CD2 Extracellular domain with D111H mutation within the CD2 Extracellular domain:
(SEQ ID NO: 4)
CD2 Transmembrane domain:
(SEQ ID NO: 14)
CD28 Intracellular domain:
(SEQ ID NO: 113)

[symbol]

[symbol]

CD3z Intracellular domain:
(SEQ ID NO: 5)

[0266] An exemplary nucleotide sequence encoding a mutant CSR 02 CD2.DH.28z protein of the disclosure comprises or consists of the nucleotide sequence of (CD2 Signal peptide, CD2 Extracellular domain with D111H mutation within the CD2 Extracellular domain, CD2 Transmembrane domain, CD28 Intracellular domain, CD3z Intracellular domain):

(SEQ ID NO: 114)
ATGAGCTTCCCTTGCAAGTTCGTGGCCAGCTTCCTGCTGATCTTCAACGTGTCCTCTAAGGG
CGCCGTGTCCAAAGAAATCACGAATGCATTGGAAACCTGGGGAGCCCTCGGCCAGGATATTA
ACCTGGACATCCCCAGCTTCCAGATGAGCGACGACATCGATGACATCAAGTGGGAGAAAACC
AGCGACAAGAAGAAGATCGCCCAGTTCCGGAAAGAGAAAGAGACATTCAAAGAGAAGGACAC
CTACAAGCTGTTCAAGAACGGCACCCTGAAGATCAAGCACCTGAAAACCGACGACCAGGACA
TCTATAAGGTGTCCATCTACCACACCAAGGGCAAGAACGTGCTGGAAAAGATCTTCGACCTC
AAGATCCAAGAGCGGGTGTCCAAGCCTAAGATCAGCTGGACCTGCATCAACACCACACTGAC
CTGCGAAGTGATGAACGGCACAGACCCCGAGCTGAACCTGTACCAGGATGGCAAACACCTGA
AGCTGAGCCAGCGCGTGATCACCCACAAGTGGACAACAAGCCTGAGCGCCAAGTTCAAGTGC
ACCGCCGGAAACAAAGTGTCTAAAGAGTCCAGCGTCGAGCCCGTGTCTTGCCCTGAAAAAGG
ACTGGACATCTACCTGATCATCGGCATCTGTGGCGGCGGATCCCTGCTGATGGTGTTTGTGG
CTCTGCTGGTGTTCTACATCACC

[symbol]

[symbol]

[symbol]

[symbol]

[symbol]

[symbol]

AGAGTGAAATTCAGCCGCAGCGCCGATGCTCCTGCCTATA
AGCAGGGACAGAACCAGCTGTACAACGAGCTGAATCTGGGGCGCAGAGAAGAGTACGATGTG
CTGGACAAGCGGAGAGGCAGAGATCCTGAGATGGGCGGCAAGCCCAGACGGAAGAATCCTCA
AGAGGGCCTGTATAATGAGCTGCAGAAAGACAAGATGGCCGAGGCCTACAGCGAGATCGGAA
TGAAGGGCGAGCGCAGAAGAGGCAAGGGACACGATGGACTGTATCAGGGCCTGAGCACCGCC
ACCAAGGATACCTATGATGCCCTGCACATGCAGGCCCTGCCTCCAAGA
CD2 Signal peptide:
(SEQ ID NO: 100)
CD2 Extracellular domain with D111H mutation within the CD2 Extracellular domain:
(SEQ ID NO: 106)
CD2 Transmembrane domain:
(SEQ ID NO: 102)
CD28 Intracellular domain:
(SEQ ID NO: 115)

[symbol]

[symbol]

[symbol]

[symbol]

[symbol]

[symbol]

CD3z Intracellular domain:
(SEQ ID NO: 94)

[0267] An exemplary mutant CSR 02b CD2.8.DH.28z protein of the disclosure comprises or consists of the amino acid sequence of (CD8a Signal peptide, CD2 Extracellular domain with D111H mutation within the CD2 Extracellular domain, CD2 Transmembrane domain, CD28 Intracellular domain, CD3z Intracellular domain):

(SEQ ID NO: 116)
MALPVTALLLPLALLLHAARPKEITNALETWGALGQDINLDIPSFQMSDDIDDIKWEKTSDK
KKIAQFRKEKETFKEKDTYKLFKNGTLKIKHLKTDDQDIYKVSIYHTKGKNVLEKIFDLKIQ
ERVSKPKISWTCINTTLTCEVMNGTDPELNLYQDGKHLKLSQRVITHKWTTSLSAKFKCTAG
NKVSKESSVEPVSCPEKGLDIYLIIGICGGGSLLMVFVALLVFYIT [symbol] [symbol]
RVKFSRSADAPAYKQGQNQLYNELNLGRREEYDVLDK
RRGRDPEMGGKPRRKNPQEGLYNELQKDKMAEAYSEIGMKGERRRGKGHDGLYQGLSTATKD
TYDALHMQALPPR
CD8a Signal peptide:
(SEQ ID NO: 12)
CD2 Extracellular domain with D111H mutation within the CD2 Extracellular domain:
(SEQ ID NO: 4)
CD2 Transmembrane domain:
(SEQ ID NO: 14)
CD28 Intracellular domain:
(SEQ ID NO: 113)
CD3z Intracellular domain:
(SEQ ID NO: 5)

[0268] An exemplary nucleotide sequence encoding a mutant CSR 02b CD2.8.DH.28z protein of the disclosure comprises or consists of the nucleotide sequence of (CD8a Signal peptide, CD2 Extracellular domain with D111H mutation within the CD2 Extracellular domain, CD2 Transmembrane domain, CD28 Intracellular domain, CD3z Intracellular domain):

(SEQ ID NO: 117)
ATGGCTCTGCCTGTGACAGCTCTGCTGCTGCCTCTGGCTCTGCTTCTGCATGCCGCCAGACC
TAAAGAAATCACGAATGCATTGGAAACCTGGGGAGCCCTCGGCCAGGATATTAACCTGGACA
TCCCCAGCTTCCAGATGAGCGACGACATCGATGACATCAAGTGGGAGAAAACCAGCGACAAG
AAGAAGATCGCCCAGTTCCGGAAAGAGAAAGAGACATTCAAAGAGAAGGACACCTACAAGCT
GTTCAAGAACGGCACCCTGAAGATCAAGCACCTGAAAACCGACGACCAGGACATCTATAAGG
TGTCCATCTACCACACCAAGGGCAAGAACGTGCTGGAAAAGATCTTCGACCTCAAGATCCAA
GAGCGGGTGTCCAAGCCTAAGATCAGCTGGACCTGCATCAACACCACACTGACCTGCGAAGT
GATGAACGGCACAGACCCCGAGCTGAACCTGTACCAGGATGGCAAACACCTGAAGCTGAGCC
AGCGCGTGATCACCCACAAGTGGACAACAAGCCTGAGCGCCAAGTTCAAGTGCACCGCCGGA
AACAAAGTGTCTAAAGAGTCCAGCGTCGAGCCCGTGTCTTGCCCTGAAAAAGGACTGGACAT
CTACCTGATCATCGGCATCTGTGGCGGCGGATCCCTGCTGATGGTGTTTGTGGCTCTGCTGG
TGTTCTACATCACC

[symbol]

[symbol]

[symbol]

[symbol]

[symbol]

[symbol]

[symbol]

AGAGTGAAATTCAGCCGCAGCGCCGATGCTCCTGCCTATAAGCAGGGAC
AGAACCAGCTGTACAACGAGCTGAATCTGGGGCGCAGAGAAGAGTACGATGTGCTGGACAAG
CGGAGAGGCAGAGATCCTGAGATGGGCGGCAAGCCCAGACGGAAGAATCCTCAAGAGGGCCT
GTATAATGAGCTGCAGAAAGACAAGATGGCCGAGGCCTACAGCGAGATCGGAATGAAGGGCG
AGCGCAGAAGAGGCAAGGGACACGATGGACTGTATCAGGGCCTGAGCACCGCCACCAAGGAT
ACCTATGATGCCCTGCACATGCAGGCCCTGCCTCCAAGA
CD8a Signal peptide:
(SEQ ID NO: 111)
ATGGCTCTGCCTGTGACAGCTCTGCTGCTGCCTCTGGCTCTGCTTCTGCATGCCGCCAGACC
T
CD2 Extracellular domain with D111H mutation within the
CD2 Extracellular domain:
(SEQ ID NO: 106)
CD2 Transmembrane domain:
(SEQ ID NO: 102)
CD28 Intracellular domain:
(SEQ ID NO: 115)

[symbol]

[symbol]

[symbol]

[symbol]

[symbol]

[symbol]

CD3z Intracellular domain:
(SEQ ID NO: 94)

[0269] An exemplary mutant CSR 03 CD2.DH.BBz protein of the disclosure comprises or consists of the amino acid sequence of (CD2 Signal peptide, CD2 Extracellular domain with D111H mutation within the CD2 Extracellular domain, CD2 Transmembrane domain, 4-1BB Intracellular domain, CD3z Intracellular domain):

(SEQ ID NO: 118)
MSFPCKFVASFLLIFNVSSKGAVSKEITNALETWGALGQDINLDTPSFQMSDDIDDTKWEKT
SDKKKIAQFRKEKETFKEKDTYKLFKNGTLKIKHLKTDDQDIYKVSIYHTKGKNVLEKIFDL
KIQERVSKPKISWTCINTTLTCEVMNGTDPELNLYQDGKHLKLSQRVITHKWTTSLSAKFKC
TAGNKVSKESSVEPVSCPEKGLDIYLIIGICGGGSLLMVFVALLVFYIT [symbol] [symbol] [symbol]
RVKFSRSADAPAYKQGQNQLYNELNLGRREEYD
VLDKRRGRDPEMGGKPRRKNPQEGLYNELQKDKMAEAYSEIGMKGERRRGKGHDGLYQGLST
ATKDTYDALHMQALPPR
CD2 Signal peptide:
(SEQ ID NO: 9)
CD2 Extracellular domain with D111H mutation within
the CD2 Extracellular domain:
(SEQ ID NO: 4)
CD2 Transmembrane domain:
(SEQ ID NO: 14)
4-1BB Intracellular domai:
(SEQ ID NO: 119)

[symbol]

[symbol]

CD3z Intracellular domain:
(SEQ ID NO: 5)

[0270] An exemplary nucleotide sequence encoding a mutant CSR 03 CD2.DH.BBz protein of the disclosure comprises or consists of the nucleotide sequence of (CD2 Signal peptide, CD2 Extracellular domain with D111H mutation within the CD2 Extracellular domain, CD2 Transmembrane domain, 4-1BB Intracellular domain, CD3z Intracellular domain):

(SEQ ID NO: 120)
ATGAGCTTCCCTTGCAAGTTCGTGGCCAGCTTCCTGCTGATCTTCAACGTGTCCTCTAAGGG
CGCCGTGTCCAAAGAAATCACGAATGCATTGGAAACCTGGGGAGCCCTCGGCCAGGATATTA
ACCTGGACATCCCCAGCTTCCAGATGAGCGACGACATCGATGACATCAAGTGGGAGAAAACC
AGCGACAAGAAGAAGATCGCCCAGTTCCGGAAAGAGAAAGAGACATTCAAAGAGAAGGACAC
CTACAAGCTGTTCAAGAACGGCACCCTGAAGATCAAGCACCTGAAAACCGACGACCAGGACA
TCTATAAGGTGTCCATCTACCACACCAAGGGCAAGAACGTGCTGGAAAAGATCTTCGACCTC
AAGATCCAAGAGCGGGTGTCCAAGCCTAAGATCAGCTGGACCTGCATCAACACCACACTGAC
CTGCGAAGTGATGAACGGCACAGACCCCGAGCTGAACCTGTACCAGGATGGCAAACACCTGA
AGCTGAGCCAGCGCGTGATCACCCACAAGTGGACAACAAGCCTGAGCGCCAAGTTCAAGTGC
ACCGCCGGAAACAAAGTGTCTAAAGAGTCCAGCGTCGAGCCCGTGTCTTGCCCTGAAAAAGG
ACTGGACATCTACCTGATCATCGGCATCTGTGGCGGCGGATCCCTGCTGATGGTGTTTGTGG
CTCTGCTGGTGTTCTAGATGAGC

[symbol]

[symbol]

[symbol]

[symbol]

[symbol]

[symbol]

[symbol]

AGAGTGAAATTCAGCCGCAGCGCCGATGCTCCTGCCT
ATAAGCAGGGACAGAACCAGCTGTACAACGAGCTGAATCTGGGGCGCAGAGAAGAGTACGAT
GTGCTGGACAAGCGGAGAGGCAGAGATCCTGAGATGGGCGGCAAGCCCAGACGGAAGAATCC
TCAAGAGGGCCTGTATAATGAGCTGCAGAAAGACAAGATGGCCGAGGCCTACAGCGAGATCG
GAATGAAGGGCGAGCGCAGAAGAGGCAAGGGACACGATGGACTGTATCAGGGCCTGAGCACC
GCCACCAAGGATACCTATGATGCCCTGCACATGCAGGCCCTGCCTCCAAGA
CD2 Signal peptide:
(SEQ ID NO: 100)
CD2 Extracellular domain with D111H mutation
within the CD2 Extracellular domain:
(SEQ ID NO: 106)
CD2 Transmembrane domain:
(SEQ ID NO: 102)
4-1BB Intracellular domain:
(SEQ ID NO: 121)

[symbol]

[symbol]

[symbol]

[symbol]

[symbol]

[symbol]

TG
CD3z Intracellular domain:
(SEQ ID NO: 94)

[0271] An exemplary mutant CSR 03b CD2.8.DH.BBz protein of the disclosure comprises or consists of the amino acid sequence of (CD8a Signal peptide, CD2 Extracellular domain with D111H mutation within the CD2 Extracellular domain, CD2 Transmembrane domain, 4-1BB Intracellular domain, CD3z Intracellular domain):

(SEQ ID NO: 122)
MALPVTALLLPLALLLHAARPKEITNALETWGALGQDINLDIPSFQMSDDIDDIKWEKTSDK
KKIAQFRKEKETFKEKDTYKLFKNGTLKIKHLKTDDQDIYKVSIYHTKGKNVLEKIFDLKIQ
ERVSKPKISWTCINTTLTCEVMNGTDPELNLYQDGKHLKLSQRVITHKWTTSLSAKFKCTAG
NKVSKESSVEPVSCPEKGLDIYLIIGICGGGSLLMVFVALLVFYIT [symbol] [symbol]
RVKFSRSADAPAYKQGQNQLYNELNLGRREEYDVLD
KRRGRDPEMGGKPRRKNPQEGLYNELQKDKMAEAYSEIGMKGERRRGKGHDGLYQGLSTATK
DTYDALHMQALPPR
CD8a Signal peptide:
(SEQ ID NO: 12)
CD2 Extracellular domain with D111H mutation within
the CD2 Extracellular domain
(SEQ ID NO: 4)
CD2 Transmembrane domain:
(SEQ ID NO: 14)
4-1BB Intracellular domain:
(SEQ ID NO: 119)
CD3z Intracellular domain:
(SEQ ID NO: 5)

[0272] An exemplary nucleotide sequence encoding a mutant CSR 03b CD2.8.DH.BBz protein of the disclosure comprises or consists of the nucleotide sequence of (CD8a Signal peptide, CD2 Extracellular domain with D111H mutation within the CD2 Extracellular domain, CD2 Transmembrane domain, 4-1BB Intracellular domain, CD3z Intracellular domain):

(SEQ ID NO: 123)
ATGGCTCTGCCTGTGACAGCTCTGCTGCTGCCTCTGGCTCTGCTTCTGCATGCCGCCAGACC
TAAAGAAATCACGAATGCATTGGAAACCTGGGGAGCCCTCGGCCAGGATATTAACCTGGACA
TCCCCAGCTTCCAGATGAGCGACGACATCGATGACATCAAGTGGGAGAAAACCAGCGACAAG
AAGAAGATCGCCCAGTTCCGGAAAGAGAAAGAGACATTCAAAGAGAAGGACACCTACAAGCT
GTTCAAGAACGGCACCCTGAAGATCAAGCACCTGAAAACCGACGACCAGGACATCTATAAGG
TGTCCATCTACCACACCAAGGGCAAGAACGTGCTGGAAAAGATCTTCGACCTCAAGATCCAA
GAGCGGGTGTCCAAGCCTAAGATCAGCTGGACCTGCATCAACACCACACTGACCTGCGAAGT
GATGAACGGCACAGACCCCGAGCTGAACCTGTACCAGGATGGCAAACACCTGAAGCTGAGCC
AGCGCGTGATCACCCACAAGTGGACAACAAGCCTGAGCGCCAAGTTCAAGTGCACCGCCGGA
AACAAAGTGTCTAAAGAGTCCAGCGTCGAGCCCGTGTCTTGCCCTGAAAAAGGACTGGACAT
CTACCTGATCATCGGCATCTGTGGCGGCGGATCCCTGCTGATGGTGTTTGTGGCTCTGCTGG
TGTTCTACATCACC

[symbol]

[symbol]

[symbol]

[symbol]

[symbol]

[symbol]

[symbol]

AGAGTGAAATTCAGCCGCAGCGCCGATGCTCCTGCCTATAAGCAGG
GACAGAACCAGCTGTACAACGAGCTGAATCTGGGGCGCAGAGAAGAGTACGATGTGCTGGAC
AAGCGGAGAGGCAGAGATCCTGAGATGGGCGGCAAGCCCAGACGGAAGAATCCTCAAGAGGG
CCTGTATAATGAGCTGCAGAAAGACAAGATGGCCGAGGCCTACAGCGAGATCGGAATGAAGG
GCGAGCGCAGAAGAGGCAAGGGACACGATGGACTGTATCAGGGCCTGAGCACCGCCACCAAG
GATACCTATGATGCCCTGCACATGCAGGCCCTGCCTCCAAGA
CD8a Signal peptide:
(SEQ ID NO: 111)
ATGGCTCTGCCTGTGACAGCTCTGCTGCTGCCTCTGGCTCTGCTTCTGCATGCCGCCAGACC
T
CD2 Extracellular domain with D111H mutation within
the CD2 Extracellular domain:
(SEQ ID NO: 106)
CD2 Transmembrane domain:
(SEQ ID NO: 102)
4-1BB Intracellular domain:
(SEQ ID NO: 121)

[symbol]

[symbol]

[symbol]

[symbol]

[symbol]

[symbol]

[symbol]

CD3z Intracellular domain:
(SEQ ID NO: 94)

[0273] An exemplary mutant CSR 04 CD2.DH.7z protein of the disclosure comprises or consists of the amino acid sequence of (CD2 Signal peptide, CD2 Extracellular domain with D111H mutation within the CD2 Extracellular domain, CD2 Transmembrane domain, IL7RA Intracellular domain, CD3z Intracellular domain):

(SEQ ID NO: 124)
MSFPCKFVASFLLIFNVSSKGAVSKEITNALETWGALGQDINLDTPSFQMSDDIDDTKWEKT
SDKKKIAQFRKEKETFKEKDTYKLFKNGTLKIKHLKTDDQDIYKVSIYHTKGKNVLEKIFDL
KIQERVSKPKISWTCINTTLTCEVMNGTDPELNLYQDGKHLKLSQRVITHKWTTSLSAKFKC
TAGNKVSKESSVEPVSCPEKGLDIYLIIGICGGGSLLMVFVALLVFYIT

[symbol]

[symbol]

[symbol]

[symbol]

[symbol]

[symbol]

[symbol]

[symbol]

[symbol]

[symbol]

RYRF
SRSADAPAYKQGQNQLYNELNLGRREEYDVLDKRRGRDPEMGGKPRRKNPQEGLYNELQKDK
[sequence omitted]
CD2 Signal peptide:
(SEQ ID NO: 9)
CD2 Extracellular domain with D111H mutation within
the CD2 Extracellular domain:
(SEQ ID NO: 4)
CD2 Transmembrane domain:
(SEQ ID NO: 14)
IL7RA Intracellular domain:
(SEQ ID NO: 125)

[symbol]

[symbol]

[symbol]

[symbol]

[symbol]

[symbol]

[symbol]

[symbol]

[symbol]

[symbol]

CD3z Intracellular domain:
(SEQ ID NO: 5)

[0274] An exemplary nucleotide sequence encoding a mutant CSR 04 CD2.DH.7z protein of the disclosure comprises or consists of the nucleotide sequence of (CD2 Signal peptide, CD2 Extracellular domain with D111H mutation within the CD2 Extracellular domain, CD2 Transmembrane domain, IL7RA Intracellular domain, CD3z Intracellular domain):

(SEQ ID NO: 126)
ATGAGCTTCCCTTGCAAGTTCGTGGCCAGCTTCCTGCTGATCTTCAACGTGTCCTCTAAGGG
CGCCGTGTCCAAAGAAATCACGAATGCATTGGAAACCTGGGGAGCCCTCGGCCAGGATATTA
ACCTGGACATCCCCAGCTTCCAGATGAGCGACGACATCGATGACATCAAGTGGGAGAAAACC
AGCGACAAGAAGAAGATCGCCCAGTTCCGGAAAGAGAAAGAGACATTCAAAGAGAAGGACAC
CTACAAGCTGTTCAAGAACGGCACCCTGAAGATCAAGCACCTGAAAACCGACGACCAGGACA
TCTATAAGGTGTCCATCTACCACACCAAGGGCAAGAACGTGCTGGAAAAGATCTTCGACCTC
AAGATCCAAGAGCGGGTGTCCAAGCCTAAGATCAGCTGGACCTGCATCAACACCACACTGAC
CTGCGAAGTGATGAACGGCACAGACCCCGAGCTGAACCTGTACCAGGATGGCAAACACCTGA
AGCTGAGCCAGCGCGTGATCACCCACAAGTGGACAACAAGCCTGAGCGCCAAGTTCAAGTGC
ACCGCCGGAAACAAAGTGTCTAAAGAGTCCAGCGTCGAGCCCGTGTCTTGCCCTGAAAAAGG
ACTGGACATCTACCTGATCATCGGCATCTGTGGCGGCGGATCCCTGCTGATGGTGTTTGTGG
CTCTGCTGGTGTTCTACATCACC

[symbol]

[symbol]

[symbol]

[symbol]

[symbol]

[symbol]

[symbol]

[symbol]

[symbol]

[symbol]

[symbol]

[symbol]

[symbol]

[symbol]

[symbol]

[symbol]

[symbol]

[symbol]

[symbol]

[symbol]

[symbol]

[symbol]

[symbol]

[symbol]

[symbol]

[symbol]

[symbol]

[symbol]

[symbol]

AGAGAAATTC
AGCCGCAGCGCCGATGCTCCTGCCTATAAGCAGGGACAGAACCAGCTGTACAACGAGCTGAA
TCTGGGGCGCAGAGAAGAGTACGATGTGCTGGACAAGCGGAGAGGCAGAGATCCTGAGATGG
GCGGCAAGCCCAGACGGAAGAATCCTCAAGAGGGCCTGTATAATGAGCTGCAGAAAGACAAG
ATGGCCGAGGCCTACAGCGAGATCGGAATGAAGGGCGAGCGCAGAAGAGGCAAGGGACACGA
TGGACTGTATCAGGGCCTGAGCACCGCCACCAAGGATACCTATGATGCCCTGCACATGCAGG
CCCTGCCTCCAAGA
CD2 Signal peptide:
(SEQ ID NO: 100)
CD2 Extracellular domain with D111H mutation within the CD2
Extracellular domain:
(SEQ ID NO: 106)
CD2 Transmembrane domain:
(SEQ ID NO: 102)
IL7RA Intracellular domain:
(SEQ ID NO: 127)

[symbol]

[symbol]

[symbol]

[symbol]

[symbol]

[symbol]

[symbol]

[symbol]

[symbol]

[symbol]

[symbol]

[symbol]

[symbol]

[symbol]

[symbol]

[symbol]

[symbol]

[symbol]

[symbol]

[symbol]

[symbol]

[symbol]

[symbol]

[symbol]

[symbol]

[symbol]

[symbol]

[symbol]

[symbol]

CD3z Intracellular domain:
(SEQ ID NO: 94)

[0275] An exemplary mutant CSR 04b CD2.8.DH.7z protein of the disclosure comprises or consists of the amino acid sequence of (CD8a Signal peptide, CD2 Extracellular domain with D111H mutation within the CD2 Extracellular domain, CD2 Transmembrane domain, IL7RA Intracellular domain, CD3z Intracellular domain):

(SEQ ID NO: 128)
MALPVTALLLPLALLLHAARPKEITTNALETWGALGQDINLDIPSFQMSDDIDDIKWEKTSDK
KKIAQFRKEKETFKEKDTYKLFKNGTLKIKHLKTDDQDIYKVSIYHTKGKNVLEKIFDLKIQ
ERVSKPKISWTCINTTLTCEVMNGTDPELNLYQDGKHLKLSQRVITHKWTTSLSAKFKCTAG
NKVSKESSVEPVSCPEKGLDIYLIIGICGGGSLLMVFVALLVFYIT

[symbol]

[symbol]

[symbol]

[symbol]

[symbol]

[symbol]

[symbol]

[symbol]

[symbol]

[symbol]

RVKFSRS
ADAPAYKQGQNQLYNELNLGRREEYDVLDKRRGRDPEMGGKPRRKNPQEGLYNELQKDKMAE
AYSEIGMKGERRRGKGHDGLYQGLSTATKDTYDALHMQALPPR
CD8a Signal peptide:
(SEQ ID NO: 12)
CD2 Extracellular domain with D111H mutation
within the CD2 Extracellular domain:
(SEQ ID NO: 4)
CD2 Transmembrane domain:
(SEQ ID NO: 14)
IL7RA Intracellular domain:
(SEQ ID NO: 125)
CD3z Intracellular domain:
(SEQ ID NO: 5)

[0276] An exemplary nucleotide sequence encoding a mutant CSR 04b CD2.8.DH.7z protein of the disclosure comprises or consists of the nucleotide sequence of (CD8a Signal peptide, CD2 Extracellular domain with D111H mutation within the CD2 Extracellular domain, CD2 Transmembrane domain, IL7RA Intracellular domain, CD3z Intracellular domain):

(SEQ ID NO: 129)
ATGGCTCTGCCTGTGACAGCTCTGCTGCTGCCTCTGGCTCTGCTTCTGCATGCCGCCAGACC
TAAAGAAATCACGAATGCATTGGAAACCTGGGGAGCCCTCGGCCAGGATATTAACCTGGACA
TCCCCAGCTTCCAGATGAGCGACGACATCGATGACATCAAGTGGGAGAAAACCAGCGACAAG
AAGAAGATCGCCCAGTTCCGGAAAGAGAAAGAGACATTCAAAGAGAAGGACACCTACAAGCT
GTTCAAGAACGGCACCCTGAAGATCAAGCACCTGAAAACCGACGACCAGGACATCTATAAGG
TGTCCATCTACCACACCAAGGGCAAGAACGTGCTGGAAAAGATCTTCGACCTCAAGATCCAA
GAGCGGGTGTCCAAGCCTAAGATCAGCTGGACCTGCATCAACACCACACTGACCTGCGAAGT
GATGAACGGCACAGACCCCGAGCTGAACCTGTACCAGGATGGCAAACACCTGAAGCTGAGCC
AGCGCGTGATCACCCACAAGTGGACAACAAGCCTGAGCGCCAAGTTCAAGTGCACCGCCGGA
AACAAAGTGTCTAAAGAGTCCAGCGTCGAGCCCGTGTCTTGCCCTGAAAAAGGACTGGACAT
CTACCTGATCATCGGCATCTGTGGCGGCGGATCCCTGCTGATGGTGTTTGTGGCTCTGCTGG
TGTTCTACATCACC

[symbol]

[symbol]

[symbol]

[symbol]

[symbol]

[symbol]

[symbol]

[symbol]

[symbol]

[symbol]

[symbol]

[symbol]

[symbol]

[symbol]

[symbol]

[symbol]

[symbol]

[symbol]

[symbol]

[symbol]

[symbol]

[symbol]

[symbol]

[symbol]

[symbol]

[symbol]

[symbol]

[symbol]

AGAGTGAAATCAGCCGCAGC
GCCGATGCTCCTGCCTATAAGCAGGGACAGAACCAGCTGTACAACGAGCTGAATCTGGGGCG
CAGAGAAGAGTACGATGTGCTGGACAAGCGGAGAGGCAGAGATCCTGAGATGGGCGGCAAGC
CCAGACGGAAGAATCCTCAAGAGGGCCTGTATAATGAGCTGCAGAAAGACAAGATGGCCGAG
GCCTACAGCGAGATCGGAATGAAGGGCGAGCGCAGAAGAGGCAAGGGACACGATGGACTGTA
TCAGGGCCTGAGCACCGCCACCAAGGATACCTATGATGCCCTGCACATGCAGGCCCTGCCTC
CAAGA
CD8a Signal peptide:
(SEQ ID NO: 111)
ATGGCTCTGCCTGTGACAGCTCTGCTGCTGCCTCTGGCTCTGCTTCTGCATGCCGCCAGACC
T
CD2 Extracellular domain with D111H mutation within the CD2
Extracellular domain:
(SEQ ID NO: 106)
CD2 Transmembrane domain:
(SEQ ID NO: 102)
IL7RA Intracellular domain:
(SEQ ID NO: 127)
CD3z Intracellular domain:
(SEQ ID NO: 94)

[0277] An exemplary mutant CSR 05 CD2.DH.15z protein of the disclosure comprises or consists of the amino acid sequence of (CD2 Signal peptide, CD2 Extracellular domain with D111H mutation within the CD2 Extracellular domain, CD2 Transmembrane domain, IL15RA Intracellular domain, CD3z Intracellular domain):

(SEQ ID NO: 130)
MSFPCKFVASFLLIFNVSSKGAVSKEITNALETWGALGQDINLDTPSFQMSDDIDDTKWEKT
SDKKKIAQFRKEKETFKEKDTYKLFKNGTLKIKHLKTDDQDIYKVSIYHTKGKNVLEKIFDL
KIQERVSKPKISWTCINTTLTCEVMNGTDPELNLYQDGKHLKLSQRVITHKWTTSLSAKFKC
TAGNKVSKESSVEPVSCPEKGLDIYLIIGICGGGSLLMVFVALLVFYIT [symbol] [symbol]
RVKFSRSADAPAYKQGQNQLYNELNLGRREEYDVLD
KRRGRDPEMGGKPRRKNPQEGLYNELQKDKMAEAYSEIGMKGERRRGKGHDGLYQGLSTATK
DTYDALHMQALPPR
CD2 Signal peptide:
(SEQ ID NO: 9)
CD2 Extracellular domain with D111H mutation within
the CD2 Extracellular domain:
(SEQ ID NO: 4)
CD2 Transmembrane domain:
(SEQ ID NO: 14)
IL15 RA Intracellular domain:
(SEQ ID NO: 131)

[symbol]

[symbol]

CD3z Intracellular domain:
(SEQ ID NO: 5)

[0278] An exemplary nucleotide sequence encoding a mutant CSR 05 CD2.DH.15z protein of the disclosure comprises or consists of the nucleotide sequence of (CD2 Signal peptide, CD2 Extracellular domain with D111H mutation within the CD2 Extracellular domain, CD2 Transmembrane domain, IL15RA Intracellular domain, CD3z Intracellular domain):

(SEQ ID NO: 132)
ATGAGCTTCCCTTGCAAGTTCGTGGCCAGCTTCCTGCTGATCTTCAACGTGTCCTCTAAGGG
CGCCGTGTCCAAAGAAATCACGAATGCATTGGAAACCTGGGGAGCCCTCGGCCAGGATATTA
ACCTGGACATCCCCAGCTTCCAGATGAGCGACGACATCGATGACATCAAGTGGGAGAAAACC
AGCGACAAGAAGAAGATCGCCCAGTTCCGGAAAGAGAAAGAGACATTCAAAGAGAAGGACAC
CTACAAGCTGTTCAAGAACGGCACCCTGAAGATCAAGCACCTGAAAACCGACGACCAGGACA
TCTATAAGGTGTCCATCTACCACACCAAGGGCAAGAACGTGCTGGAAAAGATCTTCGACCTC
AAGATCCAAGAGCGGGTGTCCAAGCCTAAGATCAGCTGGACCTGCATCAACACCACACTGAC
CTGCGAAGTGATGAACGGCACAGACCCCGAGCTGAACCTGTACCAGGATGGCAAACACCTGA
AGCTGAGCCAGCGCGTGATCACCCACAAGTGGACAACAAGCCTGAGCGCCAAGTTCAAGTGC
ACCGCCGGAAACAAAGTGTCTAAAGAGTCCAGCGTCGAGCCCGTGTCTTGCCCTGAAAAAGG
ACTGGACATCTACCTGATCATCGGCATCTGTGGCGGCGGATCCCTGCTGATGGTGTTTGTGG
CTCTGCTGGTGTTCTACATCACC

[symbol]

[symbol]

[symbol]

[symbol]

[symbol]

[symbol]

AGAGTGAAATTCAGCCGCAGCGCCGATGCTCCTGCCTATAAGCAGG
GACAGAACCAGCTGTACAACGAGCTGAATCTGGGGCGCAGAGAAGAGTACGATGTGCTGGAC
AAGCGGAGAGGCAGAGATCCTGAGATGGGCGGCAAGCCCAGACGGAAGAATCCTCAAGAGGG
CCTGTATAATGAGCTGCAGAAAGACAAGATGGCCGAGGCCTACAGCGAGATCGGAATGAAGG
GCGAGCGCAGAAGAGGCAAGGGACACGATGGACTGTATCAGGGCCTGAGCACCGCCACCAAG
GATACCTATGATGCCCTGCACATGCAGGCCCTGCCTCCAAGA
CD2 Signal peptide:
(SEQ ID NO: 100)
CD2 Extracellular domain with D111H mutation
within the CD2 Extracellular domain:
(SEQ ID NO: 106)
CD2 Transmembrane domain:
(SEQ ID NO: 102)
IL15RA Intracellular domain:
(SEQ ID NO: 133)

[symbol]

[symbol]

[symbol]

[symbol]

[symbol]

[symbol]

CD3z Intracellular domain:
(SEQ ID NO: 94)

[0279] An exemplary mutant CSR 05b CD2.8.DH.15z protein of the disclosure comprises or consists of the amino acid sequence of (CD8a Signal peptide, CD2 Extracellular domain with D111H mutation within the CD2 Extracellular domain, CD2 Transmembrane domain, IL15RA Intracellular domain, CD3z Intracellular domain):

(SEQ ID NO: 134)
MALPVTALLLPLALLLHAARPKEITTNALETWGALGQDINLDIPSFQMSDDIDDIKWEKTSDK
KKIAQFRKEKETFKEKDTYKLFKNGTLKIKHLKTDDQDIYKVSIYHTKGKNVLEKIFDLKIQ
ERVSKPKISWTCINTTLTCEVMNGTDPELNLYQDGKHLKLSQRVITHKWTTSLSAKFKCTAG
TAGNKVSKESSVEPVSCPEKGL DIYLIIGICGGGSLLMVFVALLVFYIT [symbol] [symbol]
RVKFSRSADAPAYKQGQNQLYNELNLGRREEYDVLDKRR
GRDPEMGGKPRRKNPQEGLYNELQKDKMAEAYSEIGMKGERRRGKGHDGLYQGLSTATKDTY
DALHMQALPPR
CD8a Signal peptide:
(SEQ ID NO: 12)
CD2 Extracellular domain with D111H mutation within
the CD2 Extracellular domain:
(SEQ ID NO: 4)
CD2 Transmembrane domain:
(SEQ ID NO: 14)
IL15RA Intracellular domain″.
(SEQ ID NO: 131)
CD3z Intracellular domain:
(SEQ ID NO: 5)

[0280] An exemplary nucleotide sequence encoding a mutant CSR 05b CD2.8.DH.15z protein of the disclosure comprises or consists of the nucleotide sequence of (CD8a Signal peptide, CD2 Extracellular domain with D111H mutation within the CD2 Extracellular domain, CD2 Transmembrane domain, IL15RA Intracellular domain, CD3z Intracellular domain):

(SEQ ID NO: 135)
ATGGCTCTGCCTGTGACAGCTCTGCTGCTGCCTCTGGCTCTGCTTCTGCATGCCGCCAGACC
TAAAGAAATCACGAATGCATTGGAAACCTGGGGAGCCCTCGGCCAGGATATTAACCTGGACA
TCCCCAGCTTCCAGATGAGCGACGACATCGATGACATCAAGTGGGAGAAAACCAGCGACAAG
AAGAAGATCGCCCAGTTCCGGAAAGAGAAAGAGACATTCAAAGAGAAGGACACCTACAAGCT
GTTCAAGAACGGCACCCTGAAGATCAAGCACCTGAAAACCGACGACCAGGACATCTATAAGG
TGTCCATCTACCACACCAAGGGCAAGAACGTGCTGGAAAAGATCTTCGACCTCAAGATCCAA
GAGCGGGTGTCCAAGCCTAAGATCAGCTGGACCTGCATCAACACCACACTGACCTGCGAAGT
GATGAACGGCACAGACCCCGAGCTGAACCTGTACCAGGATGGCAAACACCTGAAGCTGAGCC
AGCGCGTGATCACCCACAAGTGGACAACAAGCCTGAGCGCCAAGTTCAAGTGCACCGCCGGA
AACAAAGTGTCTAAAGAGTCCAGCGTCGAGCCCGTGTCTTGCCCTGAAAAAGGACTGGACAT
CTACCTGATCATCGGCATCTGTGGCGGCGGATCCCTGCTGATGGTGTTTGTGGCTCTGCTGG
TGTTCTACAACAC

[symbol]

[symbol]

[symbol]

[symbol]

[symbol]

[symbol]

[symbol]

AGAGTGAAATTCAGCCGCAGCGCCGATGCTCCTGCCTATAAGCAGGGACAGAACC
AGCTGTACAACGAGCTGAATCTGGGGCGCAGAGAAGAGTACGATGTGCTGGACAAGCGGAGA
GGCAGAGATCCTGAGATGGGCGGCAAGCCCAGACGGAAGAATCCTCAAGAGGGCCTGTATAA
TGAGCTGCAGAAAGACAAGATGGCCGAGGCCTACAGCGAGATCGGAATGAAGGGCGAGCGCA
GAAGAGGCAAGGGACACGATGGACTGTATCAGGGCCTGAGCACCGCCACCAAGGATACCTAT
GATGCCCTGCACATGCAGGCCCTGCCTCCAAGA
CD8a Signal peptide:
(SEQ ID NO: 111)
ATGGCTCTGCCTGTGACAGCTCTGCTGCTGCCTCTGGCTCTGCTTCTGCATGCCGCCAGACCT
CD2 Extracellular domain with D111H mutation within
the CD2 Extracellular domain:
(SEQ ID NO: 106)
CD2 Transmembrane domain:
(SEQ ID NO: 102)
IL15RA Intracellular domain:
(SEQ ID NO: 133)

[symbol]

[symbol]

[symbol]

[symbol]

[symbol]

[symbol]

CD3z Intracellular domain:
(SEQ ID NO: 94)

[0281] An exemplary mutant CSR 06 CD2.DH.21z protein of the disclosure comprises or consists of the amino acid sequence of (CD2 Signal peptide, CD2 Extracellular domain with D111H mutation within the CD2 Extracellular domain, CD2 Transmembrane domain, IL21R Intracellular domain, CD3z Intracellular domain):

(SEQ ID NO: 136)
MSFPCKFVASFLLIFNVSSKGAVSKEITNALETWGALGQDINLDTPSFQMSDDIDDTKWEKT
SDKKKIAQFRKEKETFKEKDTYKLFKNGTLKIKHLKTDDQDIYKVSIYHTKGKNVLEKIFDL
KIQERVSKPKISWTCINTTLTCEVMNGTDPELNLYQDGKHLKLSQRVITHKWTTSLSAKFKC
TAGNKVSKESSVEPVSCPEKGLDIYLIIGICGGGSLLMVFVALLVFYIT

[symbol]

[symbol]

[symbol]

[symbol]

[symbol]

[symbol]

[symbol]

[symbol]

[symbol]

[symbol]

[symbol]

[symbol]

[symbol]

PPRSYLRQWVVIPPPLSSPGPQASRVKFSRSADAPAYKQGQNQLYNELNLGRREEYDVLDKR
RGRDPEMGGKPRRKNPQEGLYNELQKDKMAEAYSEIGMKGERRRGKGHDGLYQGLSTATKDT
YDALHMQALPPR
CD2 Signal peptide:
(SEQ ID NO: 9)
CD2 Extracellular domain with D111H mutation within the CD2
Extracellular domain:
(SEQ ID NO: 4)
CD2 Transmembrane domain:
(SEQ ID NO: 14)
IL21R Intracellular domain:
(SEQ ID NO: 137)

[symbol]

[symbol]

[symbol]

[symbol]

[symbol]

[symbol]

[symbol]

[symbol]

[symbol]

[symbol]

[symbol]

[symbol]

[symbol]

[symbol]

CD3z Intracellular domain:
(SEQ ID NO: 5)

[0282] An exemplary nucleotide sequence encoding a mutant CSR 06 CD2.DH.21z protein of the disclosure comprises or consists of the nucleotide sequence of (CD2 Signal peptide, CD2 Extracellular domain with D111H mutation within the CD2 Extracellular domain, CD2 Transmembrane domain, IL21R Intracellular domain, CD3z Intracellular domain):

(SEQ ID NO: 138)
ATGAGCTTCCCTTGCAAGTTCGTGGCCAGCTTCCTGCTGATCTTCAACGTGTCCTCTAAGGG
CGCCGTGTCCAAAGAAATCACGAATGCATTGGAAACCTGGGGAGCCCTCGGCCAGGATATTA
ACCTGGACATCCCCAGCTTCCAGATGAGCGACGACATCGATGACATCAAGTGGGAGAAAACC
AGCGACAAGAAGAAGATCGCCCAGTTCCGGAAAGAGAAAGAGACATTCAAAGAGAAGGACAC
CTACAAGCTGTTCAAGAACGGCACCCTGAAGATCAAGCACCTGAAAACCGACGACCAGGACA
TCTATAAGGTGTCCATCTACCACACCAAGGGCAAGAACGTGCTGGAAAAGATCTTCGACCTC
AAGATCCAAGAGCGGGTGTCCAAGCCTAAGATCAGCTGGACCTGCATCAACACCACACTGAC
CTGCGAAGTGATGAACGGCACAGACCCCGAGCTGAACCTGTACCAGGATGGCAAACACCTGA
AGCTGAGCCAGCGCGTGATCACCCACAAGTGGACAACAAGCCTGAGCGCCAAGTTCAAGTGC
ACCGCCGGAAACAAAGTGTCTAAAGAGTCCAGCGTCGAGCCCGTGTCTTGCCCTGAAAAAGG
ACTGGACATCTACCTGATCATCGGCATCTGTGGCGGCGGATCCCTGCTGATGGTGTTTGTGG
CTCTGCTGGTGTTCTAGATCACC

[symbol]

[symbol]

[symbol]

[symbol]

[symbol]

[symbol]

[symbol]

[symbol]

[symbol]

[symbol]

[symbol]

[symbol]

[symbol]

[symbol]

[symbol]

[symbol]

[symbol]

[symbol]

[symbol]

[symbol]

[symbol]

[symbol]

[symbol]

[symbol]

[symbol]

[symbol]

[symbol]

[symbol]

[symbol]

[symbol]

[symbol]

[symbol]

[symbol]

[symbol]

[symbol]

[symbol]

[symbol]

[symbol]

[symbol]

[symbol]

[symbol]

[symbol]

AGAGTGAAATTCAGCCGCAGCGCCGATGCTCCTGCCTATAAGCAGGGACAGA
ACCAGCTGTACAACGAGCTGAATCTGGGGCGCAGAGAAGAGTACGATGTGCTGGACAAGCGG
AGAGGCAGAGATCCTGAGATGGGCGGCAAGCCCAGACGGAAGAATCCTCAAGAGGGCCTGTA
TAATGAGCTGCAGAAAGACAAGATGGCCGAGGCCTACAGCGAGATCGGAATGAAGGGCGAGC
GCAGAAGAGGCAAGGGACACGATGGACTGTATCAGGGCCTGAGCACCGCCACCAAGGATACC
TATGATGCCCTGCACATGCAGGCCCTGCCTCCAAGA
CD2 Signal peptide:
(SEQ ID NO: 100)
CD2 Extracellular domain with D111H mutation within the CD2
Extracellular domain:
(SEQ ID NO: 106)
CD2 Transmembrane domain:
(SEQ ID NO: 102)
IL21R Intracellular domain:
(SEQ ID NO: 139)

[symbol]

[symbol]

[symbol]

[symbol]

[symbol]

[symbol]

[symbol]

[symbol]

[symbol]

[symbol]

[symbol]

[symbol]

[symbol]

[symbol]

[symbol]

[symbol]

[symbol]

[symbol]

[symbol]

[symbol]

[symbol]

[symbol]

[symbol]

[symbol]

[symbol]

[symbol]

[symbol]

[symbol]

[symbol]

[symbol]

[symbol]

[symbol]

[symbol]

[symbol]

[symbol]

[symbol]

[symbol]

[symbol]

[symbol]

[symbol]

[symbol]

[symbol]

CD3z Intracellular domain:
(SEQ ID NO: 94)

[0283] An exemplary mutant CSR 06b CD2.8.DH.21z protein of the disclosure comprises or consists of the amino acid sequence of (CD8a Signal peptide, CD2 Extracellular domain with D111H mutation within the CD2 Extracellular domain, CD2 Transmembrane domain, IL21R Intracellular domain, CD3z Intracellular domain):

(SEQ ID NO: 140)
MALPVTALLLPLALLLHAARPKEITNALETWGALGQDINLDIPSFQMSDDIDDIKWEKTSDK
KKIAQFRKEKETFKEKDTYKLFKNGTLKIKHLKTDDQDIYKVSIYHTKGKNVLEKIFDLKIQ
ERVSKPKISWTCINTTLTCEVMNGTDPELNLYQDGKHLKLSQRVITHKWTTSLSAKFKCTAG
NKVSKESSVEPVSCPEKGLDIYLIIGICGGGSLLMVFVALLVFYIT

[symbol]

[symbol]

[symbol]

[symbol]

[symbol]

[symbol]

[symbol]

[symbol]

[symbol]

[symbol]

[symbol]

[symbol]

[symbol]

[symbol]

RVKFSRSADAPAYKQGQNQLYNELNLGRREEYDVLDKRRGR
DPEMGGKPRRKNPQEGLYNELQKDKMAEAYSEIGMKGERRRGKGHDGLYQGLSTATKDTYDA
LHMQALPPR
CD8a Signal peptide:
(SEQ ID NO: 12)
CD2 Extracellular domain with D111H mutation within the CD2
Extracellular domain:
(SEQ ID NO: 4)
CD2 Transmembrane domain:
(SEQ ID NO: 14)
IL21R Intracellular domain:
(SEQ ID NO: 137)
CD3z Intracellular domain:
(SEQ ID NO: 5)

[0284] An exemplary nucleotide sequence encoding a mutant CSR 06b CD2.8.DH.21z protein of the disclosure comprises or consists of the nucleotide sequence of (CD8a Signal peptide, CD2 Extracellular domain with D111H mutation within the CD2 Extracellular domain, CD2 Transmembrane domain, IL21R Intracellular domain, CD3z Intracellular domain):

(SEQ ID NO: 141)
ATGGCTCTGCCTGTGACAGCTCTGCTGCTGCCTCTGGCTCTGCTTCTGCATGCCGCCAGACC
TAAAGAAATCACGAATGCATTGGAAACCTGGGGAGCCCTCGGCCAGGATATTAACCTGGACA
TCCCCAGCTTCCAGATGAGCGACGACATCGATGACATCAAGTGGGAGAAAACCAGCGACAAG
AAGAAGATCGCCCAGTTCCGGAAAGAGAAAGAGACATTCAAAGAGAAGGACACCTACAAGCT
GTTCAAGAACGGCACCCTGAAGATCAAGCACCTGAAAACCGACGACCAGGACATCTATAAGG
TGTCCATCTACCACACCAAGGGCAAGAACGTGCTGGAAAAGATCTTCGACCTCAAGATCCAA
GAGCGGGTGTCCAAGCCTAAGATCAGCTGGACCTGCATCAACACCACACTGACCTGCGAAGT
GATGAACGGCACAGACCCCGAGCTGAACCTGTACCAGGATGGCAAACACCTGAAGCTGAGCC
AGCGCGTGATCACCCACAAGTGGACAACAAGCCTGAGCGCCAAGTTCAAGTGCACCGCCGGA
AACAAAGTGTCTAAAGAGTCCAGCGTCGAGCCCGTGTCTTGCCCTGAAAAAGGACTGGACAT
CTACCTGATCATCGGCATCTGTGGCGGCGGATCCCTGCTGATGGTGTTTGTGGCTCTGCTGG
TGTTCTAGATCACC

[symbol]

[symbol]

[symbol]

[symbol]

[symbol]

[symbol]

[symbol]

[symbol]

[symbol]

[symbol]

[symbol]

[symbol]

[symbol]

[symbol]

[symbol]

[symbol]

[symbol]

[symbol]

[symbol]

[symbol]

[symbol]

[symbol]

[symbol]

[symbol]

[symbol]

[symbol]

[symbol]

[symbol]

[symbol]

[symbol]

[symbol]

[symbol]

[symbol]

[symbol]

[symbol]

[symbol]

[symbol]

[symbol]

[symbol]

[symbol]

[symbol]

[symbol]

CAGAGTGAAATTCAGCCGCAGCGCCGATGCTCCTGCCTATAAGCAGGGACAGAACCAGCTGT
ACAACGAGCTGAATCTGGGGCGCAGAGAAGAGTACGATGTGCTGGACAAGCGGAGAGGCAGA
GATCCTGAGATGGGCGGCAAGCCCAGACGGAAGAATCCTCAAGAGGGCCTGTATAATGAGCT
GCAGAAAGACAAGATGGCCGAGGCCTACAGCGAGATCGGAATGAAGGGCGAGCGCAGAAGAG
GCAAGGGACACGATGGACTGTATCAGGGCCTGAGCACCGCCACCAAGGATACCTATGATGCC
CTGCACATGCAGGCCCTGCCTCCAAGA
CD8a Signal peptide:
(SEQ ID NO: 111)
ATGGCTCTGCCTGTGACAGCTCTGCTGCTGCCTCTGGCTCTGCTTCTGCATGCCGCCAGACC
T
CD2 Extracellular domain with D111H mutation within the CD2
Extracellular domain:
(SEQ ID NO: 106)
CD2 Transmembrane domain:
(SEQ ID NO: 102)
IL21R Intracellular domain:
(SEQ ID NO: 139)
CD3z Intracellular domain:
(SEQ ID NO: 94)

[0285] An exemplary mutant CSR 07 CD2.DH.Iz protein of the disclosure comprises or consists of the amino acid sequence of (CD2 Signal peptide, CD2 Extracellular domain with D111H mutation within the CD2 Extracellular domain, CD2 Transmembrane domain, ICOS Intracellular domain, CD3z Intracellular domain):

(SEQ ID NO: 142)
MSFPCKFVASFLLIFNVSSKGAVSKEITNALETWGALGQDINLDTPSFQMSDDIDDTKWEKT
SDKKKIAQFRKEKETFKEKDTYKLFKNGTLKIKHLKTDDQDIYKVSIYHTKGKNVLEKIFDL
KIQERVSKPKISWTCINTTLTCEVMNGTDPELNLYQDGKHLKLSQRVITHKWTTSLSAKFKC
TAGNKVSKESSVEPVSCPEKGL DIYLIIGICGGGSLLMVFVALLVFYIT [symbol] [symbol]
RVKFSRSADAPAYKQGQNQLYNELNLGRREEYDVLDK
RRGRDPEMGGKPRRKNPQEGLYNELQKDKMAEAYSEIGMKGERRRGKGHDGLYQGLSTATKD
TYDALHMQALPPR
CD2 Signal peptide:
(SEQ ID NO: 9)
CD2 Extracellular domain with D111H mutation within
the CD2 Extracellular domain:
(SEQ ID NO: 4)
CD2 Transmembrane domain:
(SEQ ID NO: 14)
ICOS Intracellular domain:
(SEQ ID NO: 143)

[symbol]

[symbol]

CD3z Intracellular domain:
(SEQ ID NO: 5)

[0286] An exemplary nucleotide sequence encoding a mutant CSR 07 CD2.DH.Iz protein of the disclosure comprises or consists of the nucleotide sequence of (CD2 Signal peptide, CD2 Extracellular domain with D111H mutation within the CD2 Extracellular domain, CD2 Transmembrane domain, ICOS Intracellular domain, CD3z Intracellular domain):

(SEQ ID NO: 144)
ATGAGCTTCCCTTGCAAGTTCGTGGCCAGCTTCCTGCTGATCTTCAACGTGTCCTCTAAGGG
CGCCGTGTCCAAAGAAATCACGAATGCATTGGAAACCTGGGGAGCCCTCGGCCAGGATATTA
ACCTGGACATCCCCAGCTTCCAGATGAGCGACGACATCGATGACATCAAGTGGGAGAAAACC
AGCGACAAGAAGAAGATCGCCCAGTTCCGGAAAGAGAAAGAGACATTCAAAGAGAAGGACAC
CTACAAGCTGTTCAAGAACGGCACCCTGAAGATCAAGCACCTGAAAACCGACGACCAGGACA
TCTATAAGGTGTCCATCTACCACACCAAGGGCAAGAACGTGCTGGAAAAGATCTTCGACCTC
AAGATCCAAGAGCGGGTGTCCAAGCCTAAGATCAGCTGGACCTGCATCAACACCACACTGAC
CTGCGAAGTGATGAACGGCACAGACCCCGAGCTGAACCTGTACCAGGATGGCAAACACCTGA
AGCTGAGCCAGCGCGTGATCACCCACAAGTGGACAACAAGCCTGAGCGCCAAGTTCAAGTGC
ACCGCCGGAAACAAAGTGTCTAAAGAGTCCAGCGTCGAGCCCGTGTCTTGCCCTGAAAAAGG
ACTGGACATCTACCTGATCATCGGCATCTGTGGCGGCGGATCCCTGCTGATGGTGTTTGTGG
CTCTGCTGGTGTTCTACATCACC

[symbol]

[symbol]

[symbol]

[symbol]

[symbol]

[symbol]

AGAGTGAAATTCAGCCGCAGCGCCGATGCTCCTGCCTATAAGCAGGGAC
AGAACCAGCTGTACAACGAGCTGAATCTGGGGCGCAGAGAAGAGTACGATGTGCTGGACAAG
CGGAGAGGCAGAGATCCTGAGATGGGCGGCAAGCCCAGACGGAAGAATCCTCAAGAGGGCCT
GTATAATGAGCTGCAGAAAGACAAGATGGCCGAGGCCTACAGCGAGATCGGAATGAAGGGCG
AGCGCAGAAGAGGCAAGGGACACGATGGACTGTATCAGGGCCTGAGCACCGCCACCAAGGAT
ACCTATGATGCCCTGCACATGCAGGCCCTGCCTCCAAGA
CD2 Signal peptide:
(SEQ ID NO: 100)
CD2 Extracellular domain with D111H mutation within the CD2
Extracellular domain:
(SEQ ID NO: 106)
CD2 Transmembrane domain:
(SEQ ID NO: 102)
ICOS Intracellular domain:
(SEQ ID NO: 145)

[symbol]

[symbol]

[symbol]

[symbol]

[symbol]

[symbol]

CD3z Intracellular domain:
(SEQ ID NO: 94)

[0287] An exemplary mutant CSR 07b CD2.8.DH.Iz protein of the disclosure comprises or consists of the amino acid sequence of (CD8a Signal peptide, CD2 Extracellular domain with D111H mutation within the CD2 Extracellular domain, CD2 Transmembrane domain, ICOS Intracellular domain, CD3z Intracellular domain):

(SEQ ID NO: 146)
MALPVTALLLPLALLLHAARPKEITNALETWGALGQDINLDIPSFQMSDDIDDIKWEKTSDK
KKIAQFRKEKETFKEKDTYKLFKNGTLKIKHLKTDDQDIYKVSIYHTKGKNVLEKIFDLKIQ
ERVSKPKISWTCINTTLTCEVMNGTDPELNLYQDGKHLKLSQRVITHKWTTSLSAKFKCTAG
NKVSKESSVEPVSCPEKGLDIYLIIGICGGGSLLMVFVALLVFYIT [symbol] [symbol]
RVKFSRSADAPAYKQGQNQLYNELNLGRREEYDVLDKRRG
RDPEMGGKPRRKNPQEGLYNELQKDKMAEAYSEIGMKGERRRGKGHDGLYQGLSTATKDTYD
ALHMQALPPR
CD8a Signal peptide:
(SEQ ID NO: 12)
CD2 Extracellular domain with D111H mutation within the CD2
Extracellular domain:
(SEQ ID NO: 4)
CD2 Transmembrane domain:
(SEQ ID NO: 14)
ICOS Intracellular domain:
(SEQ ID NO: 143)
CD3z Intracellular domain:
(SEQ ID NO: 5)

[0288] An exemplary nucleotide sequence encoding a mutant CSR 07b CD2.8.DH.Iz protein of the disclosure comprises or consists of the nucleotide sequence of (CD8a Signal peptide, CD2 Extracellular domain with D111H mutation within the CD2 Extracellular domain, CD2 Transmembrane domain, ICOS Intracellular domain, CD3z Intracellular domain):

(SEQ ID NO: 147)
ATGGCTCTGCCTGTGACAGCTCTGCTGCTGCCTCTGGCTCTGCTTCTGCATGCCGCCAGACC
TAAAGAAATCACGAATGCATTGGAAACCTGGGGAGCCCTCGGCCAGGATATTAACCTGGACA
TCCCCAGCTTCCAGATGAGCGACGACATCGATGACATCAAGTGGGAGAAAACCAGCGACAAG
AAGAAGATCGCCCAGTTCCGGAAAGAGAAAGAGACATTCAAAGAGAAGGACACCTACAAGCT
GTTCAAGAACGGCACCCTGAAGATCAAGCACCTGAAAACCGACGACCAGGACATCTATAAGG
TGTCCATCTACCACACCAAGGGCAAGAACGTGCTGGAAAAGATCTTCGACCTCAAGATCCAA
GAGCGGGTGTCCAAGCCTAAGATCAGCTGGACCTGCATCAACACCACACTGACCTGCGAAGT
GATGAACGGCACAGACCCCGAGCTGAACCTGTACCAGGATGGCAAACACCTGAAGCTGAGCC
AGCGCGTGATCACCCACAAGTGGACAACAAGCCTGAGCGCCAAGTTCAAGTGCACCGCCGGA
AACAAAGTGTCTAAAGAGTCCAGCGTCGAGCCCGTGTCTTGCCCTGAAAAAGGACTGGACAT
CTACCTGATCATCGGCATCTGTGGCGGCGGATCCCTGCTGATGGTGTTTGTGGCTCTGCTGG
TGTTCTAGATCACC

[symbol]

[symbol]

[symbol]

[symbol]

[symbol]

[symbol]

AGAGTGAAATTCAGCCGCAGCGCCGATGCTCCTGCCTATAAGCAGGGACAGAACCAGC
TGTACAACGAGCTGAATCTGGGGCGCAGAGAAGAGTACGATGTGCTGGACAAGCGGAGAGGC
AGAGATCCTGAGATGGGCGGCAAGCCCAGACGGAAGAATCCTCAAGAGGGCCTGTATAATGA
GCTGCAGAAAGACAAGATGGCCGAGGCCTACAGCGAGATCGGAATGAAGGGCGAGCGCAGAA
GAGGCAAGGGACACGATGGACTGTATCAGGGCCTGAGCACCGCCACCAAGGATACCTATGAT
GCCCTGCACATGCAGGCCCTGCCTCCAAGA
CD8a Signal peptide:
(SEQ ID NO: 111)
ATGGCTCTGCCTGTGACAGCTCTGCTGCTGCCTCTGGCTCTGCTTCTGCATGCCGCCAGACC
T
CD2 Extracellular domain with D111H mutation within the CD2
Extracellular domain:
(SEQ ID NO: 106)
CD2 Transmembrane domain:
(SEQ ID NO: 102)
ICOS Intracellular domain:
(SEQ ID NO: 145)
CD3z Intracellular domain:
(SEQ ID NO: 94)

[0289] An exemplary mutant CSR 08 CD2.DH.27z protein of the disclosure comprises or consists of the amino acid sequence of (CD2 Signal peptide, CD2 Extracellular domain with D111H mutation within the CD2 Extracellular domain, CD2 Transmembrane domain, CD27 Intracellular domain, CD3z Intracellular domain):

(SEQ ID NO: 148)
MSFPCKFVASFLLIFNVSSKGAVSKEITNALETWGALGQDINLDTPSFQMSDDIDDTKWEKT
SDKKKIAQFRKEKETFKEKDTYKLFKNGTLKIKHLKTDDQDIYKVSIYHTKGKNVLEKIFDL
KIQERVSKPKISWTCINTTLTCEVMNGTDPELNLYQDGKHLKLSQRVITHKWTTSLSAKFKC
TAGNKVSKESSVEPVSCPEKGLDIYLIIGICGGGSLLMVFVALLVFYIT [symbol] [symbol] [symbol]
RVKFSRSADAPAYKQGQNQLYNELNLG
RREEYDVLDKRRGRDPEMGGKPRRKNPQEGLYNELQKDKMAEAYSEIGMKGERRRGKGHDGL
YQGLSTATKDTYDALHMQALPPR
CD2 Signal peptide:
(SEQ ID NO: 9)
CD2 Extracellular domain with D111H mutation within the CD2
Extracellular domain:
(SEQ ID NO: 4)
CD2 Transmembrane domain:
(SEQ ID NO: 14)
CD27Intracellular domain:
(SEQ ID NO: 149)
QRRKYRSNKGESPVEPAEPCHYSCPREEEGSTIPIQEDYRKPEPACSP
CD3z Intracellular domain:
(SEQ ID NO: 5)

[0290] An exemplary nucleotide sequence encoding a mutant CSR 08 CD2.DH.27z protein of the disclosure comprises or consists of the nucleotide sequence of (CD2 Signal peptide, CD2 Extracellular domain with D111H mutation within the CD2 Extracellular domain, CD2 Transmembrane domain, CD27 Intracellular domain, CD3z Intracellular domain):

(SEQ ID NO: 150)
ATGAGCTTCCCTTGCAAGTTCGTGGCCAGCTTCCTGCTGATCTTCAACGTGTCCTCTAAGGG
CGCCGTGTCCAAAGAAATCACGAATGCATTGGAAACCTGGGGAGCCCTCGGCCAGGATATTA
ACCTGGACATCCCCAGCTTCCAGATGAGCGACGACATCGATGACATCAAGTGGGAGAAAACC
AGCGACAAGAAGAAGATCGCCCAGTTCCGGAAAGAGAAAGAGACATTCAAAGAGAAGGACAC
CTACAAGCTGTTCAAGAACGGCACCCTGAAGATCAAGCACCTGAAAACCGACGACCAGGACA
TCTATAAGGTGTCCATCTACCACACCAAGGGCAAGAACGTGCTGGAAAAGATCTTCGACCTC
AAGATCCAAGAGCGGGTGTCCAAGCCTAAGATCAGCTGGACCTGCATCAACACCACACTGAC
CTGCGAAGTGATGAACGGCACAGACCCCGAGCTGAACCTGTACCAGGATGGCAAACACCTGA
AGCTGAGCCAGCGCGTGATCACCCACAAGTGGACAACAAGCCTGAGCGCCAAGTTCAAGTGC
ACCGCCGGAAACAAAGTGTCTAAAGAGTCCAGCGTCGAGCCCGTGTCTTGCCCTGAAAAAGG
ACTGGACATCTACCTGATCATCGGCATCTGTGGCGGCGGATCCCTGCTGATGGTGTTTGTGG
CTCTGCTGGTGTTCTACATCACC

[symbol]

[symbol]

[symbol]

[symbol]

[symbol]

[symbol]

[symbol]

AGAGTGAAATTCAGCCGCA
GCGCCGATGCTCCTGCCTATAAGCAGGGACAGAACCAGCTGTACAACGAGCTGAATCTGGGG
CGCAGAGAAGAGTACGATGTGCTGGACAAGCGGAGAGGCAGAGATCCTGAGATGGGCGGCAA
GCCCAGACGGAAGAATCCTCAAGAGGGCCTGTATAATGAGCTGCAGAAAGACAAGATGGCCG
AGGCCTACAGCGAGATCGGAATGAAGGGCGAGCGCAGAAGAGGCAAGGGACACGATGGACTG
TATCAGGGCCTGAGCACCGCCACCAAGGATACCTATGATGCCCTGCACATGCAGGCCCTGCC
TCCAAGA
CD2 Signal peptide:
(SEQ ID NO: 100)
CD2 Extracellular domain with D111H mutation within the CD2
Extracellular domain:
(SEQ ID NO: 106)
CD2 Transmembrane domain:
(SEQ ID NO: 102)
CD2 7Intracellular domain:
(SEQ ID NO: 151)

[symbol]

[symbol]

[symbol]

[symbol]

[symbol]

[symbol]

[symbol]

CD3z Intracellular domain:
(SEQ ID NO: 94)

[0291] An exemplary mutant CSR 08b CD2.8.DH.27z protein of the disclosure comprises or consists of the amino acid sequence of (CD8a Signal peptide, CD2 Extracellular domain with D111H mutation within the CD2 Extracellular domain, CD2 Transmembrane domain, CD27 Intracellular domain, CD3z Intracellular domain):

(SEQ ID NO: 152)
MALPVTALLLPLALLLHAARPKEITNALETWGALGQDINLDIPSFQMSDDIDDIKWEKTSDK
KKIAQFRKEKETFKEKDTYKLFKNGTLKIKHLKTDDQDIYKVSIYHTKGKNVLEKIFDLKIQ
ERVSKPKISWTCINTTLTCEVMNGTDPELNLYQDGKHLKLSQRVITHKWTTSLSAKFKCTAG
NKVSKESSVEPVSCPEKGLDIYLIIGICGGGSLLMVFVALLVFYIT [symbol] [symbol] [symbol]
RVKFSRSADAPAYKQGQNQLYNELNLGRRE
EYDVLDKRRGRDPEMGGKPRRKNPQEGLYNELQKDKMAEAYSEIGMKGERRRGKGHDGLYQG
LSTATKDTYDALHMQALPPR
CD8a Signal peptide:
(SEQ ID NO: 12)
CD2 Extracellular domain with D111H mutation within the CD2
Extracellular domain:
(SEQ ID NO: 4)
CD2 Transmembrane domain:
(SEQ ID NO: 14)
CD27 Intracellular domain:
(SEQ ID NO: 149)
CD3z Intracellular domain:
(SEQ ID NO: 5)

[0292] An exemplary nucleotide sequence encoding a mutant CSR 08b CD2.8.DH.27z protein of the disclosure comprises or consists of the nucleotide sequence of (CD8a Signal peptide, CD2 Extracellular domain with D111H mutation within the CD2 Extracellular domain, CD2 Transmembrane domain, CD27 Intracellular domain, CD3z Intracellular domain):

(SEQ ID NO: 153)
ATGGCTCTGCCTGTGACAGCTCTGCTGCTGCCTCTGGCTCTGCTTCTGCATGCCGCCAGACC
TAAAGAAATCACGAATGCATTGGAAACCTGGGGAGCCCTCGGCCAGGATATTAACCTGGACA
TCCCCAGCTTCCAGATGAGCGACGACATCGATGACATCAAGTGGGAGAAAACCAGCGACAAG
AAGAAGATCGCCCAGTTCCGGAAAGAGAAAGAGACATTCAAAGAGAAGGACACCTACAAGCT
GTTCAAGAACGGCACCCTGAAGATCAAGCACCTGAAAACCGACGACCAGGACATCTATAAGG
TGTCCATCTACCACACCAAGGGCAAGAACGTGCTGGAAAAGATCTTCGACCTCAAGATCCAA
GAGCGGGTGTCCAAGCCTAAGATCAGCTGGACCTGCATCAACACCACACTGACCTGCGAAGT
GATGAACGGCACAGACCCCGAGCTGAACCTGTACCAGGATGGCAAACACCTGAAGCTGAGCC
AGCGCGTGATCACCCACAAGTGGACAACAAGCCTGAGCGCCAAGTTCAAGTGCACCGCCGGA
AACAAAGTGTCTAAAGAGTCCAGCGTCGAGCCCGTGTCTTGCCCTGAAAAAGGACTGGACAT
CTACCTGATCATCGGCATCTGTGGCGGCGGATCCCTGCTGATGGTGTTTGTGGCTCTGCTGG
TGTTCTACATCACC

[symbol]

[symbol]

[symbol]

[symbol]

[symbol]

[symbol]

[symbol]

[symbol]

AGAGTGAAATTGAGCCGGAGCGCCGATG
CTCCTGCCTATAAGCAGGGACAGAACCAGCTGTACAACGAGCTGAATCTGGGGCGCAGAGAA
GAGTACGATGTGCTGGACAAGCGGAGAGGCAGAGATCCTGAGATGGGCGGCAAGCCCAGACG
GAAGAATCCTCAAGAGGGCCTGTATAATGAGCTGCAGAAAGACAAGATGGCCGAGGCCTACA
GCGAGATCGGAATGAAGGGCGAGCGCAGAAGAGGCAAGGGACACGATGGACTGTATCAGGGC
CTGAGCACCGCCACCAAGGATACCTATGATGCCCTGCACATGCAGGCCCTGCCTCCAAGA
CD8a Signal peptide:
(SEQ ID NO: 111)
ATGGCTCTGCCTGTGACAGCTCTGCTGCTGCCTCTGGCTCTGCTTCTGCATGCCGCCAGACCT
CD2 Extracellular domain with D111H mutation within the CD2
Extracellular domain:
(SEQ ID NO: 106)
CD2 Transmembrane domain:
(SEQ ID NO: 102)
CD27 Intracellular domain:
(SEQ ID NO: 151)
CD3z Intracellular domain:
(SEQ ID NO: 94)

[0293] An exemplary mutant CSR 09 CD2.DH.Oxz protein of the disclosure comprises or consists of the amino acid sequence of (CD2 Signal peptide, CD2 Extracellular domain with D111H mutation within the CD2 Extracellular domain, CD2 Transmembrane domain, OX40 Intracellular domain, CD3z Intracellular domain):

(SEQ ID NO: 154)
MSFPCKFVASFLLIFNVSSKGAVSKEITNALETWGALGQDINLDTPSFQMSDDIDDTKWEKT
SDKKKIAQFRKEKETFKEKDTYKLFKNGTLKIKHLKTDDQDIYKVSIYHTKGKNVLEKIFDL
KIQERVSKPKISWTCINTTLTCEVMNGTDPELNLYQDGKHLKLSQRVITHKWTTSLSAKFKC
TAGNKVSKESSVEPVSCPEKGLDIYLIIGICGGGSLLMVFVALLVFYIY [symbol] [symbol] [symbol]
RVKFSRSADAPAYKQGQNQLYNELNLGRREEYD
VLDKRRGRDPEMGGKPRRKNPQEGLYNELQKDKMAEAYSEIGMKGERRRGKGHDGLYQGLST
ATKDTYDALHMQALPPR
CD2 Signal peptide:
(SEQ ID NO: 9)
CD2 Extracellular domain with D111H mutation within the CD2
Extracellular domain
(SEQ ID NO: 4)
CD2 Transmembrane domain:
(SEQ ID NO: 14)
OX40 Intracellular domain:
(SEQ ID NO: 155)

[symbol]

[symbol]

CD3z Intracellular domain:
(SEQ ID NO: 5)

[0294] An exemplary nucleotide sequence encoding a mutant CSR 09 CD2.DH.Oxz protein of the disclosure comprises or consists of the nucleotide sequence of (CD2 Signal peptide, CD2 Extracellular domain with D111H mutation within the CD2 Extracellular domain, CD2 Transmembrane domain, OX40 Intracellular domain, CD3z Intracellular domain):

(SEQ ID NO: 156)
ATGAGCTTCCCTTGCAAGTTCGTGGCCAGCTTCCTGCTGATCTTCAACGTGTCCTCTAAGGG
CGCCGTGTCCAAAGAAATCACGAATGCATTGGAAACCTGGGGAGCCCTCGGCCAGGATATTA
ACCTGGACATCCCCAGCTTCCAGATGAGCGACGACATCGATGACATCAAGTGGGAGAAAACC
AGCGACAAGAAGAAGATCGCCCAGTTCCGGAAAGAGAAAGAGACATTCAAAGAGAAGGACAC
CTACAAGCTGTTCAAGAACGGCACCCTGAAGATCAAGCACCTGAAAACCGACGACCAGGACA
TCTATAAGGTGTCCATCTACCACACCAAGGGCAAGAACGTGCTGGAAAAGATCTTCGACCTC
AAGATCCAAGAGCGGGTGTCCAAGCCTAAGATCAGCTGGACCTGCATCAACACCACACTGAC
CTGCGAAGTGATGAACGGCACAGACCCCGAGCTGAACCTGTACCAGGATGGCAAACACCTGA
AGCTGAGCCAGCGCGTGATCACCCACAAGTGGACAACAAGCCTGAGCGCCAAGTTCAAGTGC
ACCGCCGGAAACAAAGTGTCTAAAGAGTCCAGCGTCGAGCCCGTGTCTTGCCCTGAAAAAGG
ACTGGACATCTACCTGATCATCGGCATCTGTGGCGGCGGATCCCTGCTGATGGTGTTTGTGG
CTCTGCTGGTGTTCTACATCACC

[symbol]

[symbol]

[symbol]

[symbol]

[symbol]

[symbol]

[symbol]

AGAGTGAAATTCAGCCGCAGCGCCGATGCTCCTGCCT
ATAAGCAGGGACAGAACCAGCTGTACAACGAGCTGAATCTGGGGCGCAGAGAAGAGTACGAT
GTGCTGGACAAGCGGAGAGGCAGAGATCCTGAGATGGGCGGCAAGCCCAGACGGAAGAATCC
TCAAGAGGGCCTGTATAATGAGCTGCAGAAAGACAAGATGGCCGAGGCCTACAGCGAGATCG
GAATGAAGGGCGAGCGCAGAAGAGGCAAGGGACACGATGGACTGTATCAGGGCCTGAGCACC
GCCACCAAGGATACCTATGATGCCCTGCACATGCAGGCCCTGCCTCCAAGA
CD2 Signal peptide:
(SEQ ID NO: 100)
CD2 Extracellular domain with D111H mutation within the CD2
Extracellular domain:
(SEQ ID NO: 106)
CD2 Transmembrane domain:
(SEQ ID NO: 102)
OX40 Intracellular domain:
(SEQ ID NO: 157)

[symbol]

[symbol]

[symbol]

[symbol]

[symbol]

[symbol]

[symbol]

CD3z Intracellular domain:
(SEQ ID NO: 94)

[0295] An exemplary mutant CSR 09b CD2.8.DH.Oxz protein of the disclosure comprises or consists of the amino acid sequence of (CD8a Signal peptide, CD2 Extracellular domain with D111H mutation within the CD2 Extracellular domain, CD2 Transmembrane domain, OX40 Intracellular domain, CD3z Intracellular domain):

(SEQ ID NO: 158)
MALPVTALLLPLALLLHAARPKEITTNALETWGALGQDINLDIPSFQMSDDIDDIKWEKTSDK
KKIAQFRKEKETFKEKDTYKLFKNGTLKIKHLKTDDQDIYKVSIYHTKGKNVLEKIFDLKIQ
ERVSKPKISWTCINTTLTCEVMNGTDPELNLYQDGKHLKLSQRVITHKWTTSLSAKFKCTAG
NKVSKESSVEPVSCPEKGL DIYLIIGICGGGSLLMVFVALLVFYIT [symbol] [symbol] [symbol]
RVKFSRSADAPAYKQGQNQLYNELNLGRREEYDVLD
KRRGRDPEMGGKPRRKNPQEGLYNELQKDKMAEAYSEIGMKGERRRGKGHDGLYQGLSTATK
DTYDALHMQALPPR
CD8a Signal peptide:
(SEQ ID NO: 12)
CD2 Extracellular domain with D111H mutation
within the CD2 Extracellular domain:
(SEQ ID NO: 4)
CD2 Transmembrane domain:
(SEQ ID NO: 14)
OX40 Intracellular domain:
(SEQ ID NO: 155)
CD3z Intracellular domain:
(SEQ ID NO: 5)

[0296] An exemplary nucleotide sequence encoding a mutant CSR 09b CD2.8.DH.Oxz protein of the disclosure comprises or consists of the nucleotide sequence of (CD8a Signal peptide, CD2 Extracellular domain with D111H mutation within the CD2 Extracellular domain, CD2 Transmembrane domain, OX40 Intracellular domain, CD3z Intracellular domain):

(SEQ ID NO: 159)
ATGGCTCTGCCTGTGACAGCTCTGCTGCTGCCTCTGGCTCTGCTTCTGCATGCCGCCAGACC
TAAAGAAATCACGAATGCATTGGAAACCTGGGGAGCCCTCGGCCAGGATATTAACCTGGACA
TCCCCAGCTTCCAGATGAGCGACGACATCGATGACATCAAGTGGGAGAAAACCAGCGACAAG
AAGAAGATCGCCCAGTTCCGGAAAGAGAAAGAGACATTCAAAGAGAAGGACACCTACAAGCT
GTTCAAGAACGGCACCCTGAAGATCAAGCACCTGAAAACCGACGACCAGGACATCTATAAGG
TGTCCATCTACCACACCAAGGGCAAGAACGTGCTGGAAAAGATCTTCGACCTCAAGATCCAA
GAGCGGGTGTCCAAGCCTAAGATCAGCTGGACCTGCATCAACACCACACTGACCTGCGAAGT
GATGAACGGCACAGACCCCGAGCTGAACCTGTACCAGGATGGCAAACACCTGAAGCTGAGCC
AGCGCGTGATCACCCACAAGTGGACAACAAGCCTGAGCGCCAAGTTCAAGTGCACCGCCGGA
AACAAAGTGTCTAAAGAGTCCAGCGTCGAGCCCGTGTCTTGCCCTGAAAAAGGACTGGACAT
CTACCTGATCATCGGCATCTGTGGCGGCGGATCCCTGCTGATGGTGTTTGTGGCTCTGCTGG
TGTTCTACATCACC

[symbol]

[symbol]

[symbol]

[symbol]

[symbol]

[symbol]

[symbol]

[symbol]

AGAGTGAAATTCAGCCGCAGCGCCGATGCTCCTGCCTATAAGCAGG
GACAGAACCAGCTGTACAACGAGCTGAATCTGGGGCGCAGAGAAGAGTACGATGTGCTGGAC
AAGCGGAGAGGCAGAGATCCTGAGATGGGCGGCAAGCCCAGACGGAAGAATCCTCAAGAGGG
CCTGTATAATGAGCTGCAGAAAGACAAGATGGCCGAGGCCTACAGCGAGATCGGAATGAAGG
GCGAGCGCAGAAGAGGCAAGGGACACGATGGACTGTATCAGGGCCTGAGCACCGCCACCAAG
GATACCTATGATGCCCTGCACATGCAGGCCCTGCCTCCAAGA
CD8a Signal peptide:
(SEQ ID NO: 111)
ATGGCTCTGCCTGTGACAGCTCTGCTGCTGCCTCTGGCTCTGCTTCTGCATGCCGCCAGACC
T
CD2 Extracellular domain with D111H mutation
within the CD2 Extracellular domain:
(SEQ ID NO: 106)
CD2 Transmembrane domain:
(SEQ ID NO: 102)
OX40 Intracellular domain:
(SEQ ID NO: 157)
CD3z Intracellular domain:
(SEQ ID NO: 94)

[0297] An exemplary mutant CSR 10 CD2.DH.Gz protein of the disclosure comprises or consists of the amino acid sequence of (CD2 Signal peptide, CD2 Extracellular domain with D111H mutation within the CD2 Extracellular domain, CD2 Transmembrane domain, GITR Intracellular domain, CD3z Intracellular domain):

(SEQ ID NO: 160)
MSFPCKFVASFLLIFNVSSKGAVSKEITNALETWGALGQDINLDTPSFQMSDDIDDTKWEKT
SDKKKIAQFRKEKETFKEKDTYKLFKNGTLKIKHLKTDDQDIYKVSIYHTKGKNVLEKIFDL
KIQERVSKPKISWTCINTTLTCEVMNGTDPELNLYQDGKHLKLSQRVITHKWTTSLSAKFKC
TAGNKVSKESSVEPVSCPEKGL DIYLIIGICGGGSLLMVFVALLVFYIT

[symbol]

[symbol]

[symbol]

[symbol]

NQLYNELNLGRREEYDVLDKRRGRDPEMGGKPRRKNPQEGLYNELQKDKMAEAYSEIGMKGE
RRRGKGHDGLYQGLSTATKDTYDALHMQALPPR
CD2 Signal peptide:
(SEQ ID NO: 9)
CD2 Extracellular domain with D111H
mutation within the CD2 Extracellular domain:
(SEQ ID NO: 4)
CD2 Transmembrane domain:
(SEQ ID NO: 14)
GITR Intracellular domain:

[symbol]

[symbol]

[symbol]

(SEQ ID NO: 161)
CD3z Intracellular domain:
(SEQ ID NO: 5)

[0298] An exemplary nucleotide sequence encoding a mutant CSR 10 CD2.DH.Gz protein of the disclosure comprises or consists of the nucleotide sequence of (CD2 Signal peptide, CD2 Extracellular domain with D111H mutation within the CD2 Extracellular domain, CD2 Transmembrane domain,

GITR Intracellular domain, CD3z Intracellular
domain):
(SEQ ID NO: 162)
ATGAGCTTCCCTTGCAAGTTCGTGGCCAGCTTCCTGCTGATCTTCAAC
GTGTCCTCTAAGGGCGCCGTGTCCAAAGAAATCACGAATGCATTGGAA
ACCTGGGGAGCCCTCGGCCAGGATATTAACCTGGACATCCCCAGCTTC
CAGATGAGCGACGACATCGATGACATCAAGTGGGAGAAAACCAGCGAC
AAGAAGAAGATCGCCCAGTTCCGGAAAGAGAAAGAGACATTCAAAGAG
AAGGACACCTACAAGCTGTTCAAGAACGGCACCCTGAAGATCAAGCAC
CTGAAAACCGACGACCAGGACATCTATAAGTGTCCATCTACCACACCA
AGGGCAAGAACGTGCTGGAAAAGATCTTCGACCTCAAGATCCAAGAGC
GGGTGTCCAAGCCTAAGATCAGCTGGACCTGCATCAACACCACACTGA
CCTGCGAAGTGATGAACGGCACAGACCCCGAGCTGAACCTGTACCAGG
ATGGCAAACACCTGAAGCTGAGCCAGCGCGTGATCACCCACAAGTGGA
CAACAAGCCTGAGCGCCAAGTTCAAGTGCACCGCCGGAAACAAAGTGT
CTAAAGAGTCCAGCGTCGAGCCCGTGTCTTGCCCTGAAAAAGGACTGG
ACATCTACCTGATCATCGGCATCTGTGGCGGCGGATCCCTGCTGATGG
TGTTTGTGGCTCTGCTGGTGTTCTACATCACA

[symbol]

[symbol]

[symbol]

[symbol]

[symbol]

[symbol]

[symbol]

[symbol]

[symbol]

AAATTCAGCCGCAGCGCCGATGCTCCTGCC
TATAAGCAGGGACAGAACCAGCTGTACAACGAGCTGAATCTGGGGCGC
AGAGAAGAGTACGATGTGCTGGACAAGCGGAGAGGCAGAGATCCTGAG
ATGGGCGGCAAGCCCAGACGGAAGAATCCTCAAGAGGGCCTGTATAAT
GAGCTGCAGAAAGACAAGATGGCCGAGGCCTACAGCGAGATCGGAATG
AAGGGCGAGCGCAGAAGAGGCAAGGGACACGATGGACTGTATCAGGGC
CTGAGCACCGCCACCAAGGATACCTATGATGCCCTGCACATGCAGGCC
CTGCCTCCAAGA
CD2 Signal peptide:
(SEQ ID NO: 100)
CD2 Extracellular domain with D111H mutation
within the CD2 Extracellular domain:
(SEQ ID NO: 106)
CD2 Transmembrane domain:
(SEQ ID NO: 102)
GITR Intracellular domain:
(SEQ ID NO: 163)

[symbol]

[symbol]

[symbol]

[symbol]

[symbol]

[symbol]

[symbol]

[symbol]

[symbol]

CD3z Intracellular domain:
(SEQ ID NO: 94)

[0299] An exemplary mutant CSR 10b CD2.8.DH.Gz protein of the disclosure comprises or consists of the amino acid sequence of (CD8a Signal peptide, CD2 Extracellular domain with D111H mutation within the CD2 Extracellular domain, CD2 Transmembrane domain,

GITR Intracellular domain, CD3z Intracellular
domain):
(SEQ ID NO: 164)
MALPVTALLLPLALLLHAARPKEITNALETWGALGQDINLDIPSFQMS
DDIDDIKWEKTSDKKKIAQFRKEKETFKEKDTYKLFKNGTLKIKHLKT
DDQDIYKVSIYHTKGKNVLEKIFDLKIQERVSKPKISWTCINTTLTCE
VMNGTDPELNLYQDGKHLKLSQRVITHKWTTSLSAKFKCTAGNKVSKE
SSVEPVSCPEKGLDIYLIIGICGGGSLLMVFVALLVFYIT

[symbol]

[symbol]

[symbol]

RVKFSRSADAPAYKQGQNQLYNEL
NLGRREEYDVLDKRRGRDPEMGGKPRRKNPQEGLYNELQKDKMAEAYS
EIGMKGERRRGKGHDGLYQGLSTATKDTYDALHMQALPRR
CD8 Signal peptide:
(SEQ ID NO: 12)
CD2 Extracellular domain with D111H mutation
within the CD2 Extracellular domain:
(SEQ ID NO: 4)
CD2 Transmembrane domain:
(SEQ ID NO: 14)
GITR Intracellular domain:
(SEQ ID NO: 161)
CD3z Intracelluar domain:
(SEQ ID NO: 5)

[0300] An exemplary nucleotide sequence encoding a mutant CSR 10b CD2.8.DH.Gz protein of the disclosure comprises or consists of the nucleotide sequence of (CD8a Signal peptide, CD2 Extracellular domain with D111H mutation within the CD2 Extracellular domain, CD2 Transmembrane domain,

GITR Intracellular domain, CD3z Intracellular
domain):
(SEQ ID NO: 165)
ATGGCTCTGCCTGTGACAGCTCTGCTGCTGCCTCTGGCTCTGCTTCTG
CATGCCGCCAGACCTAAAGAAATCACGAATGCATTGGAAACCTGGGGA
GCCCTCGGCCAGGATATTAACCTGGACATCCCCAGCTTCCAGATGAGC
GACGACATCGATGACATCAAGTGGGAGAAAACCAGCGACAAGAAGAAG
ATCGCCCAGTTCCGGAAAGAGAAAGAGACATTCAAAGAGAAGGACACC
TACAAGCTGTTCAAGAACGGCACCCTGAAGATCAAGCACCTGAAAACC
GACGACCAGGACATCTATAAGGTGTCCATCTACCACACCAAGGGCAAG
AACGTGCTGGAAAAGATCTTCGACCTCAAGATCCAAGAGCGGGTGTCC
AAGCCTAAGATCAGCTGGACCTGCATCAACACCACACTGACCTGCGAA
GTGATGAACGGCACAGACCCCGAGCTGAACCTGTACCAGGATGGCAAA
CACCTGAAGCTGAGCCAGCGCGTGATCACCCACAAGTGGACAACAAGC
CTGAGCGCCAAGTTCAAGTGCACCGCCGGAAACAAAGTGTCTAAAGAG
TCCAGCGTCGAGCCCGTGTCTTGCCCTGAAAAAGGACTGGACATCTAC
CTGATCATCGGCATCTGTGGCGGCGGATCCCTGCTGATGGTGTTTGTG
GCTCTGCTGGTGTTCTACATCACA

[symbol]

[symbol]

[symbol]

[symbol]

[symbol]

[symbol]

[symbol]

[symbol]

[symbol]

[symbol]

AAATTCAGCCGCAGCGCCGATGCTCCTGCCTATAAGCAGGGACAGAAC
CAGCTGTACAACGAGCTGAATCTGGGGCGCAGAGAAGAGTACGATGTG
CTGGACAAGCGGAGAGGCAGAGATCCTGAGATGGGCGGCAAGCCCAGA
CGGAAGAATCCTCAAGAGGGCCTGTATAATGAGCTGCAGAAAGACAAG
ATGGCCGAGGCCTACAGCGAGATCGGAATGAAGGGCGAGCGCAGAAGA
GGCAAGGGACACGATGGACTGTATCAGGGCCTGAGCACCGCCACCAAG
GATACCTATGATGCCCTGCACATGCAGGCCCTGCCTCCAAGA
CD8a Signal peptide
(SEQ ID NO: 111)
ATGGCTCTGCCTGTGACAGCTCTGCTGCTGCCTCTGGCTCTGCTTCTG
CATGCCGCCAGACCT
CD2 Extracellular doamin with D111H mutation
within the CD2 Extracellular domain:
(SEQ ID NO: 106)
CD2 Transmembrane domain:
(SEQ ID NO: 102)
GITR Intracellular domain:
(SEQ ID NO: 163)
CD3z Intracellular domain:
(SEQ ID NO: 94

[0301] In some embodiments, the disclosure provides a Chimeric Stimulatory Receptor (CSR) to deliver CD3z primary stimulation to Treg cells when stimulated using standard activation/stimulation reagents, including agonist anti-CD3 mAb.

[0302] In some embodiments, Chimeric Stimulatory Receptors (CSRs) of the disclosure provide a CD3 stimulus to enhance activation and expansion of regulatory T cells. In some embodiments, CSRs of the disclosure comprise an CD2, IL2RB or IL2RG extracellular domain that binds to an agonistic mAb and a TNFR2, IL2RB, IL2RG and/or CD3t intracellular stimulatory domain, which functionally, converts an anti-CD28 or anti-CD2 binding event on the surface into a TNFR2, IL2RB, IL2RG or CD3ζ signaling event in an T cell modified to express the CSR. In some embodiments, a CSR comprises a wild type CD2 extracellular domain and a TNFR2, IL2RB, IL2RG and/or a CD3z intracellular stimulatory domain. In preferred embodiments, the CSR express a non-naturally occurring antigen receptor and/or a therapeutic protein. In preferred embodiments, a CSR comprises a truncated or mutated extracellular domain CD2 protein and a CD3z intracellular stimulation domain. In some embodiments, the non-naturally occurring antigen receptor comprises a Chimeric Antigen Receptor.

[0303] The data provided herein demonstrate that modified T cells of the disclosure comprising/expressing a CSR of the disclosure improve the expansion of regulatory T cells when compared to those cells that do not comprise/express a CSR of the disclosure.

[0304] An exemplary protein sequence encoding a wild type CSR BBB.WT protein of the disclosure comprises or consists of the amino acid sequence of (IL2RB signal peptide, IL2RB extra cellular domain, IL2RB transmembrane domain, IL2RB intracellular domain):

(SEQ ID NO: 166)
MAAPALSWRLPLLILLLPLATSWASAAVNGTSQFTCFYNSRANISCVWS
QDTSCQVHAWPDRRRWNQTCELLPVSQASWACNLILGAPDSQKLTTVDI
VTLRVLCREGVRWRVMAIQDFKPFENLRLMAPISLQVVHVETHRCNISW
WISQASHYFERHLEFEARTLSPGHTWEEAPLLTLKQKQEWICLETLTPD
TQYEFQVRVKPLQGEFTTWSPWSQPLAFRTKPAALGKDTIPWLGHLLVG
LSGAFGFIIVYLLINCRNTGPWLKKVLKCNTPDPSKFFSQLSSEHGGDV
QKWLSSPFPSSSFSPGGLAPEISPLEVLERDKVTQLLLQQDKVPEPASL
SSNHSLTSCFTNQGYFFFHLPDALEIEACQVYFTYDPYSEEDPDEGVAG
APTGSSPQPLQPLSGEDDAYCRFPSRDDLLLFSPSLLGGPSPPSTAPGG
SGAGEERMPPSLQERVPRDWDPQPLGPPTPGVPDLVDFQPPPELVLREA
GEEVPDAGPREGVSFPWSRPPGQGEFRALNARLPLNTDAYLSLQELQGQ
DPTHLV

[0305] An exemplary nucleotide sequence encoding a wild type CSR BBB.WT protein of the disclosure comprises or consists of the amino acid sequence of (IL2RB signal peptide, IL2RB extra cellular domain, IL2RB transmembrane domain, IL2RB intracellular domain):

(SEQ ID NO: 167)
ATGGCTGCCCCTGCTCTGTCTTGGAGACTGCCTCTGCTGATCCTGCTGC
TGCCTCTGGCTACATCTTGGGCCTCTGCCGCCGTGAATGGCACCAGCCA
GTTCACCTGTTTCTACAACAGCCGGGCCAACATCAGCTGCGTGTGGTCA
CAAGATGGCGCCCTGCAGGATACCAGCTGTCAGGTTCACGCCTGGCCTG
ATCGGAGAAGATGGAACCAGACATGCGAGCTGCTGCCCGTGTCTCAGGC
TAGCTGGGCCTGTAATCTGATCCTGGGAGCCCCTGACAGCCAGAAACTG
ACCACAGTGGACATCGTGACCCTGCGGGTGCTGTGTAGAGAAGGCGTTC
GTTGGAGAGTGATGGCCATTCAGGACTTCAAGCCCTTCGAGAACCTGCG
GCTGATGGCCCCAATTAGCCTGCAGGTTGTGCACGTGGAAACCCACCGG
TGCAATATCAGCTGGGAGATCAGCCAGGCCAGCCACTACTTCGAGCGGC
ACCTGGAATTCGAGGCCAGAACACTGAGCCCTGGCCACACCTGGGAAGA
AGCTCCTCTGCTCACCCTGAAGCAGAAACAAGAGTGGATCTGCCTGGAA
ACCCTGACACCTGACACACAGTACGAGTTCCAAGTGCGCGTGAAGCCTC
TCCAGGGCGAGTTTACAACATGGTCCCCTTGGAGTCAGCCCCTGGCCTT
TAGAACAAAGCCTGCCGCTCTGGGCAAAGACACAATCCCTTGGCTGGGC
CATCTGCTCGTTGGACTGTCTGGCGCCTTCGGCTTCATCATCCTGGTGT
ACCTGCTGATCAACTGCCGGAACACAGGCCCCTGGCTGAAGAAAGTGCT
GAAGTGCAACACCCCTGATCCGAGCAAGTTCTTTAGCCAGCTGAGCAGC
GAGCATGGCGGCGACGTTCAGAAATGGCTGTCTAGCCCATTTCCTAGCA
GCAGCTTCAGCCCTGGTGGACTGGCCCCTGAGATTAGCCCTCTGGAAGT
GCTGGAACGGGACAAAGTGACCCAGCTGCTTCTGCAGCAGGACAAGGTG
CCAGAACCTGCCAGCCTGTCCAGCAATCACAGCCTGACCAGCTGTTTTA
CAAACCAGGGCTACTTCTTCTTCCATCTGCCTGACGCACTGGAAATTGA
GGCCTGCCAGGTGTACTTCACCTACGATCCCTACAGCGAAGAGGACCCC
GATGAAGGTGTTGCCGGTGCTCCTACCGGAAGCTCTCCTCAACCTCTGC
AACCACTGAGCGGCGAGGATGACGCCTACTGCACATTCCCCAGCAGAGA
TGACCTGCTCCTGTTCAGCCCTTCTCTGCTCGGCGGACCTTCTCCACCA
TCTACAGCTCCAGGTGGAAGCGGAGCCGGCGAGGAAAGAATGCCTCCAA
GCCTGCAAGAGCGGGTGCCCAGAGATTGGGATCCTCAACCACTGGGCCC
TCCAACACCTGGCGTGCCAGATCTCGTGGATTTCCAGCCTCCTCCAGAG
CTGGTGCTGAGAGAAGCTGGCGAAGAAGTGCCAGACGCTGGCCCTAGAG
AGGGCGTTAGCTTTCCTTGGAGCAGACCTCCTGGACAGGGCGAATTCAG
AGCCCTGAATGCCAGACTGCCCCTGAACACCGATGCCTACCTGTCTCTG
CAAGAACTGCAGGGACAAGACCCCACACACCTGGTG

[0306] An exemplary protein sequence encoding a wild type CSR GGG.WT protein of the disclosure comprises or consists of the amino acid sequence of (IL2RG signal peptide, IL2RG extra cellular domain, IL2RG transmembrane domain, IL2RG intracellular domain):

(SEQ ID NO: 168)
MLKPSLPFTSLLFLQLPLLGVGLNTTILTPNGNEDTTADFFLTTMPTDS
LSVSTLPLPEVQCFVFNVEYMNCTWNSSSEPQPTNLTLHYQYKNSDNDK
VQKCSHYLFSEEITSGCQLQKKEIHLYQTFVVQLQDPREPRRQATQMLK
LQNLVIPWAPENLTLHKLSESQLELNWNNRFLNHCLEHLVQYRTDWDHS
WTEQSVDYRHKFSLPSVDGQKRYTFRVRSRFNPLCGSAQHWSEWSHPIH
WGSNTSKENPFLFALEAVVISVGSMGLIISLLCVYFWLERTMPRIPTLK
NLEDLVTEYHGNFSAWSGVSKGLAESLQPDYSERLCLVSEIPPKGGALG
EGPGASPCNQHSPYWAPPCYTLKPET

[0307] An exemplary nucleotide sequence encoding a wild type CSR GGG.WT protein of the disclosure comprises or consists of the amino acid sequence of (IL2RG signal peptide, IL2RG extra cellular domain, IL2RG transmembrane domain, IL2RG intracellular domain):

(SEQ ID NO: 169)
ATGCTGAAGCCCAGCCTGCCTTTTACCAGCCTGCTGTTCCTGCAGCTGC
CTCTGCTTGGCGTGGGCCTGAATACCACCATCCTGACACCTAACGGCAA
CGAGGATACAACCGCCGACTTCTTCCTGACCACCATGCCTACCGATAGC
CTGAGCGTGTCCACACTGCCACTGCCTGAGGTGCAGTGCTTCGTGTTCA
ACGTCGAGTACATGAACTGCACCTGGAACAGCTCCAGCGAGCCCCAGCC
TACCAATCTGACACTGCACTACTGGTACAAGAACAGCGACAACGACAAG
GTGCAGAAGTGCAGCCACTACCTGTTCAGCGAGGAAATCACCAGCGGCT
GCCAGCTGCAGAAGAAAGAGATCCACCTGTACCAGACCTTCGTGGTGCA
GCTCCAGGATCCTAGAGAGCCTAGAAGGCAGGCCACACAGATGCTGAAA
CTGCAGAACCTGGTCATCCCCTGGGCTCCCGAAAACCTGACTCTGCACA
AGCTGAGCGAGAGCCAGCTGGAACTGAACTGGAACAACCGGTTCCTGAA
TCACTGCCTGGAACACCTGGTGCAGTACCGGACCGATTGGGATCACAGC
TGGACAGAGCAGAGCGTGGACTACCGGCACAAGTTCAGCCTGCCATCTG
TGGACGGCCAGAAGCGGTACACCTTTAGAGTGCGGAGCCGGTTCAATCC
CCTGTGTGGATCTGCTCAGCATTGGAGCGAGTGGTCACACCCTATCCAC
TGGGGCAGCAACACCAGCAAAGAGAACCCCTTCCTGTTCGCCCTGGAAG
CCGTGGTTATCAGCGTGGGCTCTATGGGCCTGATCATCTCCCTGCTGTG
CGTGTACTTCTGGCTGGAAAGAACCATGCCTCGGATCCCCACACTGAAG
AATCTGGAAGATCTGGTCACCGAGTACCACGGCAACTTCAGTGCTTGGA
GCGGCGTGTCAAAAGGCCTGGCCGAATCTCTGCAGCCCGACTACTCTGA
GAGACTGTGCCTGGTGTCTGAGATCCCTCCTAAAGGCGGAGCCCTCGGA
GAAGGACCTGGCGCCTCTCCATGTAATCAGCACAGCCCTTATTGGGCCC
CTCCTTGCTACACCCTGAAGCCTGAGACA

[0308] An exemplary protein sequence encoding a CSR 2DH.TF2z protein of the disclosure comprises or consists of the amino acid sequence of (CD2 signal peptide, CD2 extra cellular domain (DI 11H), TNFR2 transmembrane domain, TNFR2 intracellular domain #1, CD3z intracellular domain #2):

(SEQ ID NO: 17)
MSFPCKFVASFLLIFNVSSKGAVSKEITNALETWGALGQDINLDIPSFQ
MSDDIDDIKWEKTSDKKKIAQFRKEKETFKEKDTYKLFKNGTLKIKHLK
TDDQDIYKVSIYHTKGKNVLEKIFDLKIQERVSKPKISWTCINTTLTCE
VMNGTDPELNLYQDGKHLKLSQRVITHKWTTSLSAKFKCTAGNKVSKES
SVEPVSCPEKGLDFALPVGLIVGVTALGLLIIGVVNCVIMTQVKKKPLC
LQREAKVPHLPADKARGTQGPEQQHLLITAPSSSSSLESSASALDRRAP
TRNQPQAPGVEASGAGEARASTGSSDSSPGGHGTQVNVTCIVNVCSSSD
HSSQCSSQASSTMGDTDSSPSESPKDEQVPFSKEECAFRSQLETPETLL
GSTEEKPLPLGVPDAGMKPSRVKFSRSADAPAYKQGQNQLYNELNLGRR
EEYDVLDKRRGRDPEMGGKPRRKNPQEGLYNELQKDKMAEAYSEIGMKG
ERRRGKGHDGLYQGLSTATKDTYDALHMQALPPR

[0309] An exemplary nucleotide sequence encoding a CSR 2DH.TF2z protein of the disclosure comprises or consists of the amino acid sequence of (CD2 signal peptide, CD2 extra cellular domain (D111H), TNFR2 transmembrane domain, TNFR2 intracellular domain #1, CD3z intracellular domain #2):

(SEQ ID NO: 170)
ATGAGCTTCCCTTGCAAGTTCGTGGCCAGCTTCCTGCTGATCTTCAACG
TGTCCTCTAAGGGCGCCGTGTCCAAAGAGATCACAAACGCCCTGGAAAC
CTGGGGAGCCCTCGGCCAGGATATTAACCTGGACATCCCCAGCTTCCAG
ATGAGCGACGACATCGATGACATCAAGTGGGAGAAAACCAGCGACAAGA
AGAAGATCGCCCAGTTCCGGAAAGAGAAAGAGACATTCAAAGAGAAGGA
CACCTACAAGCTGTTCAAGAACGGCACCCTGAAGATCAAGCACCTGAAA
ACCGACGACCAGGACATCTATAAGGTGTCCATCTACCACACCAAGGGCA
AGAACGTGCTGGAAAAGATCTTCGACCTCAAGATCCAAGAGCGGGTGTC
CAAGCCTAAGATCAGCTGGACCTGCATCAACACCACTGACCTGCGAAGT
GATGAACGGCACAGACCCCGAGCTGAACCTGTACCAGGATGGCAAACAC
CTGAAGCTGAGCCAGCGCGTGATCACCCACAAGTGGACAACAAGCCTGA
GCGCCAAGTTCAAGTGCACCGCCGGAAACAAAGTGTCTAAAGAGTCCAG
CGTCGAGCCCGTGTCTTGCCCTGAGAAAGGCCTGGATTTTGCCCTGCCT
GTGGGCCTGATTGTGGGAGTGACAGCTCTGGGACTGCTGATCATCGGCG
TGGTCAACTGCGTGATCATGACCCAAGTGAAGAAAAAGCCCCTGTGCCT
GCAGCGCGAGGCCAAAGTTCCTCATCTGCCTGCCGATAAGGCCAGAGGC
ACACAGGGACCTGAACAGCAGCATCTGCTGATTACAGCCCCTAGCAGCA
GCAGCTCCAGCCTGGAATCTTCTGCCAGCGCTCTGGATCGGAGAGCCCC
TACCAGAAATCAGCCTCAGGCTCCTGGCGTGGAAGCTAGCGGAGCTGGC
GAAGCTAGAGCCTCTACAGGCAGCAGCGATTCTTCTCCTGGCGGCCACG
GCACACAAGTGAACGTGACCTGTATCGTGAACGTGTGCTCCAGCAGCGA
CCACAGCAGCCAGTGTAGCTCTCAGGCCAGCAGCACCATGGGCGATACA
GATAGCAGCCCTAGCGAGAGCCCCAAGGATGAACAGGTGCCCTTCAGCA
AAGAGGAATGCGCCTTCAGAAGCCAGCTGGAAACCCCTGAGACACTGCT
GGGCAGCACCGAGGAAAAACCTCTGCCTCTGGGAGTGCCCGACGCCGGA
ATGAAGCCTAGCAGAGTGAAGTTCAGCCGCAGCGCCGATGCTCCTGCCT
ATAAGCAGGGACAGAACCAGCTGTACAACGAGCTGAATCTGGGGCGCAG
AGAAGAGTACGATGTGCTGGACAAGCGGAGAGGCAGGGATCCTGAGATG
GGCGGCAAGCCCAGACGGAAGAATCCTCAAGAGGGCCTGTATAATGAGC
TGCAGAAAGACAAGATGGCCGAGGCCTACAGCGAGATCGGCATGAAGGG
CGAGCGCAGAAGAGGCAAGGGACACGATGGACTGTATCAGGGCCTGAGC
ACCGCCACCAAGGATACCTATGATGCCCTGCACATGCAGGCCCTGCCTC
CAAGA

[0310] An exemplary protein sequence encoding a CSR 2DH.2TF2z WT protein of the disclosure comprises or consists of the amino acid sequence of (CD2 signal peptide, CD2 extra cellular domain (D111H), CD2 transmembrane domain, TNFR2 intracellular domain #1, CD3z intracellular domain #2):

(SEQ ID NO: 18)
MSFPCKFVASFLLIFNVSSKGAVSKEITNALETWGALGQDINLDIPSFQ
MSDDIDDIKWEKTSDKKKIAQFRKEKETFKEKDTYKLFKNGTLKIKHLK
TDDQDIYKVSIYHTKGKNVLEKIFDLKIQERVSKPKISWTCINTTLTCE
VMNGTDPELNLYQDGKHLKLSQRVITHKWTTSLSAKFKCTAGNKVSKES
SVEPVSCPEKGLDIYLIIGICGGGSLLMVFVALLVFYITKKKPLCLQRE
AKVPHLPADKARGTQGPEQQHLLITAPSSSSSLESSASALDRRAPTRNQ
PQAPGVEASGAGEARASTGSSDSSPGGHGTQVNVTCIVNVCSSSDHSSQ
CSSQASSTMGDTDSSPSESPKDEQVPFSKEECAFRSQLETPETLLGSTE
EKPLPLGVPDAGMKPSRVKFSRSADAPAYKQGQNQLYNELNLGRREEYD
VLDKRRGRDPEMGGKPRRKNPQEGLYNELQKDKMAEAYSEIGMKGERRR
GKGHDGLYQGLSTATKDTYDALHMQALPPR

[0311] An exemplary nucleotide sequence encoding a CSR 2DH.2TF2z WT protein of the disclosure comprises or consists of the amino acid sequence of (CD2 signal peptide, CD2 extra cellular domain (D111H), CD2 transmembrane domain, TNFR2 intracellular domain #1, CD3z intracellular domain #2):

(SEQ ID NO: 171)
ATGAGCTTCCCTTGCAAGTTCGTGGCCAGCTTCCTGCTGATCTTCAACG
TGTCCTCTAAGGGCGCCGTGTCCAAAGAGATCACAAACGCCCTGGAAAC
CTGGGGAGCCCTCGGCCAGGATATTAACCTGGACATCCCCAGCTTCCAG
ATGAGCGACGACATCGATGACATCAAGTGGGAGAAAACCAGCGACAAGA
AGAAGATCGCCCAGTTCCGGAAAGAGAAAGAGACATTCAAAGAGAAGGA
CACCTACAAGCTGTTCAAGAACGGCACCCTGAAGATCAAGCACCTGAAA
ACCGACGACCAGGACATCTATAAGGTGTCCATCTACCACACCAAGGGCA
AGAACGTGCTGGAAAAGATCTTCGACCTCAAGATCCAAGAGCGGGTGTC
CAAGCCTAAGATCAGCTGGACCTGCATCAACACCACACTGACCTGCGAA
GTGATGAACGGCACAGACCCCGAGCTGAACCTGTACCAGGATGGCAAAC
ACCTGAAGCTGAGCCAGCGCGTGATCACCCACAAGTGGACAACAAGCCT
GAGCGCCAAGTTCAAGTGCACCGCCGGAAACAAAAGTGTCTAAAGAGTC
CAGCGTCGAGCCCGTGTCTTGCCCTGAAAAAGGACTGGACATCTACCTG
ATCATCGGCATCTGTGGCGGCGGAAGCCTGCTGATGGTGTTTGTGGCTC
TGCTGGTGTTCTACATCACCAAGAAAAAGCCCCTGTGCCTGCAGCGCGA
GGCCAAAGTTCCTCATCTGCCTGCCGATAAGGCCAGAGGCACAGGGACC
TGAACAGCAGCATCTGCTGATCACAGCCCCTAGCAGCAGCAGCTCTAGC
CTGGAATCTAGCGCCAGCGCTCTGGATAGAAGGGCCCCTACCAGAAACC
AGCCTCAGGCTCCTGGTGTTGAAGCTAGCGGAGCTGGCGAAGCCAGAGC
CTCTACAGGCAGCAGCGATTCTTCTCCTGGCGGCCACGGCACCCAAGTG
AACGTGACCTGTATCGTGAACGTGTGCAGCTCCAGCGACCACAGCAGCC
AGTGTAGCTCTCAGGCCAGCAGCACCATGGGCGATACAGATAGCAGCCC
TAGCGAGAGCCCCAAGGATGAACAGGTGCCCTTCAGCAAAGAGGAATGC
GCCTTCAGAAGCCAGCTGGAAACCCCTGAGACACTGCTGGGCAGCACCG
AGGAAAAACCTCTGCCTCTGGGAGTGCCCGACGCCGGAATGAAGCCTAG
CAGAGTGAAGTTCAGCCGCAGCGCCGATGCTCCTGCCTATAAGCAGGGA
CAGAACCAGCTGTACAACGAGCTGAATCTGGGGCGCAGAGAAGAGTACG
ATGTGCTGGACAAGCGGAGAGGCAGGGATCCTGAGATGGGCGGCAAGCC
CAGACGGAAGAATCCTCAAGAGGGCCTGTATAATGAGCTGCAGAAAGAC
AAGATGGCCGAGGCCTACAGCGAGATCGGCATGAAGGGCGAGCGCAGAA
GAGGCAAGGGACACGATGGACTGTATCAGGGCCTGAGCACCGCCACCAA
GGATACCTATGATGCCCTGCACATGCAGGCCCTGCCTCCAAGA

[0312] An exemplary protein sequence encoding a CSR 82DH.TF2z protein of the disclosure comprises or consists of the amino acid sequence of (CD8 signal peptide, CD2 extra cellular domain (D111H), TNFR2 transmembrane domain, TNFR2 intracellular domain #1, CD3z intracellular domain #2):

(SEQ ID NO: 37)
MALPVTALLLPLALLLHAARPKEITNALETWGALGQDINLDIPSFQMSD
DIDDIKWEKTSDKKKIAQFRKEKETFKEKDTYKLFKNGTLKIKHLKTDD
QDIYKVSIYHTKGKNVLEKIFDLKIQERVSKPKISWTCINTTLTCEVMN
GTDPELNLYQDGKHLKLSQRVITHKWTTSLSAKFKCTAGNKVSKESSVE
PVSCPEKGLDFALPVGLIVGVTALGLLIIGVVNCVIMTQVKKKPLCLQR
EAKVPHLPADKARGTQGPEQQHLLITAPSSSSSSLESSASALDRRAPTR
NQPQAPGVEASGAGEARASTGSSDSSPGGHGTQVNVTCIVNVCSSSDHS
SQCSSQASSTMGDTDSSPSESPKDEQVPFSKEECAFRSQLETPETLLGS
TEEKPLPLGVPDAGMKPSRVKFSRSADAPAYKQGQNQLYNELNLGRREE
YDVLDKRRGRDPEMGGKPRRKNPQEGLYNELQKDKMAEAYSEIGMKGER
RRGKGHDGLYQGLSTATKDTYDALHMQALPPR

[0313] An exemplary nucleotide sequence encoding a CSR 82DH.TF2z protein of the disclosure comprises or consists of the amino acid sequence of (CD8 signal peptide, CD2 extra cellular domain (D111H), TNFR2 transmembrane domain, TNFR2 intracellular domain #1, CD3z intracellular domain #2):

(SEQ ID NO: 172)
ATGGCTCTGCCTGTGACAGCTCTGCTGCTGCCTCTGGCTCTGCTTCTGC
ATGCCGCCAGACCTAAAGAGATCACAAACGCCCTGGAAACCTGGGGAGC
CCTCGGCCAGGATATTAACCTGGACATCCCCAGCTTCCAGATGAGCGAC
GACATCGATGACATCAAGTGGGAGAAAACCAGCGACAAGAAGAAGATCG
CCCAGTTCCGGAAAGAGAAAGAGACATTCAAAGAGAAGGACACCTACAA
GCTGTTCAAGAACGGCACCCTGAAGATCAAGCACCTGAAAACCGACGAC
CAGGACATCTATAAGGTGTCCATCTACCACACCAAGGGCAAGAACGTGC
TGGAAAAGATCTTCGACCTCAAGATCCAAGAGCGGGTGTCCAAGCCTAA
GATCAGCTGGACCTGCATCAACACCACACTGACCTGCGAAGTGATGAAC
GGCACAGACCCCGAGCTGAACCTGTACCAGGATGGCAAACACCTGAAGC
TGAGCCAGCGCGTGATCACCCACAAGTGGACAACAAGCCTGAGCGCCAA
GTTCAAGTGCACCGCCGGAAACAAAGTGTCCAAAGAAAGCAGCGTGGAA
CCCGTGTCTTGCCCCGAGAAAGGCCTGGATTTTGCCCTGCCTGTGGGCC
TGATTGTGGGAGTGACTGCTCTGGGCCTGCTGATCATCGGCGTGGTCAA
CTGCGTGATCATGACCCAAGTGAAGAAAAAGCCCCTGTGCCTGCAGCGC
GAGGCCAAAGTTCCTCATCTGCCTGCCGATAAGGCCAGGGGAACACAGG
GACCTGAACAGCAGCATCTGCTGATTACAGCCCCTAGCAGCAGCTCCAG
CAGCCTGGAATCTTCTGCCAGCGCTCTGGATCGGAGAGCCCCTACCAGA
AATCAGCCTCAGGCTCCTGGCGTGGAAGCTAGCGGAGCTGGCGAAGCTA
GAGCCTCTACAGGCAGCTCTGATAGCTCTCCTGGCGGCCACGGCACACA
AGTGAACGTGACCTGTATCGTGAACGTGTGCAGCTCCTCCGACCACAGC
AGCCAGTGTAGCTCTCAGGCCAGCAGCACCATGGGCGATACAGATAGCA
GCCCTAGCGAGAGCCCCAAGGATGAACAGGTGCCCTTCAGCAAAGAGGA
ATGCGCCTTCAGAAGCCAGCTGGAAACCCCTGAGACACTGCTGGGCAGC
ACCGAGGAAAAACCTCTGCCACTGGGAGTGCCCGACGCCGGAATGAAGC
CTAGCAGAGTGAAGTTCAGCAGAAGCGCCGACGCTCCCGCCTATAAGCA
GGGACAGAACCAGCTGTACAACGAGCTGAATCTGGGGCGCAGAGAAGAG
TACGATGTGCTGGACAAGCGGAGAGGCAGAGATCCTGAGATGGGCGGCA
AGCCCAGACGGAAGAATCCTCAAGAGGGCCTGTATAATGAGCTGCAGAA
AGACAAGATGGCCGAGGCCTACAGCGAGATCGGCATGAAGGGCGAGCGC
AGAAGAGGCAAGGGACACGATGGACTGTATCAGGGCCTGAGCACCGCCA
CCAAGGATACCTATGATGCCCTGCACATGCAGGCCCTGCCTCCAAGA

[0314] An exemplary protein sequence encoding a CSR 82DH.2TF2z WT protein of the disclosure comprises or consists of the amino acid sequence of (CD8 signal peptide, CD2 extra cellular domain (D111H), CD2 transmembrane domain, TNFR2 intracellular domain #1, CD3z intracellular domain #2):

(SEQ ID NO: 38)
MALPVTALLLPLALLLHAARPKEITNALETWGALGQDINLDIPSFQMSD
DIDDIKWEKTSDKKKIAQFRKEKETFKEKDTYKLFKNGTLKIKHLKTDD
QDIYKVSIYHTKGKNVLEKIFDLKIQERVSKPKISWTCINTTLTCEVMN
GTDPELNLYQDGKHLKLSQRVITHKWTTSLSAKFKCTAGNKVSKESSVE
PVSCPEKGLDIYLIIGICGGGSLLMVFVALLVFYITKKKPLCLQREAKV
PHLPADKARGTQGPEQQHLLITAPSSSSSSLESSASALDRRAPTRNQPQ
APGVEASGAGEARASTGSSDSSPGGHGTQVNVTCIVNVCSSSDHSSQCS
SQASSTMGDTDSSPSESPKDEQVPFSKEECAFRSQLETPETLLGSTEEK
PLPLGVPDAGMKPSRVKFSRSADAPAYKQGQNQLYNELNLGRREEYDVL
DKRRGRDPEMGGKPRRKNPQEGLYNELQKDKMAEAYSEIGMKGERRRGK
GHDGLYQGLSTATKDTYDALHMQALPRR

[0315] An exemplary nucleotide sequence encoding a CSR 82DH.2TF2z WT protein of the disclosure comprises or consists of the amino acid sequence of (CD8 signal peptide, CD2 extra cellular domain (D111H), CD2 transmembrane domain, TNFR2 intracellular domain #1, CD3z intracellular domain #2):

(SEQ ID NO: 173)
ATGGCTCTGCCTGTGACAGCTCTGCTGCTGCCTCTGGCTCTGCTTCTGC
ATGCCGCCAGACCTAAAGAGATCACAAACGCCCTGGAAACCTGGGGAGC
CCTCGGCCAGGATATTAACCTGGACATCCCCAGCTTCCAGATGAGCGAC
GACATCGATGACATCAAGTGGGAGAAAACCAGCGACAAGAAGAAGATCG
CCCAGTTCCGGAAAGAGAAAGAGACATTCAAAGAGAAGGACACCTACAA
GCTGTTCAAGAACGGCACCCTGAAGATCAAGCACCTGAAAACCGACGAC
CAGGACATCTATAAGGTGTCCATCTACCACACCAAGGGCAAGAACGTGC
TGGAAAAGATCTTCGACTTCAAGATCCAAGAGCGGGTGTCCAAGCCTAA
GATCAGCTGGACCTGCATCAACACCACACTGACCTGCGAAGTGATGAAC
GGCACAGACCCCGAGCTGAACCTGTACCAGGATGGCAAACACCTGAAGC
TGAGCCAGCGCGTGATCACCCACAAGTGGACAACAAGCCTGAGCGCCAA
GTTCAAGTGCACCGCCGGAAACAAAGTGTCCAAAGAAAGCAGCGTGGAA
CCCGTGTCTTGCCCCGAGAAAGGACTGGACATCTACCTGATCATCGGCA
TCTGTGGCGGCGGAAGCCTGCTGATGGTGTTTGTTGCCCTGCTGGTGTT
CTACATCACCAAGAAAAAGCCCCTGTGCCTGCAGCGCGAGGCCAAAGTT
CCTCATCTGCCTGCCGATAAGGCCAGGGGAACACAGGGACCTGAACAGC
AGCATCTGCTGATCACAGCCCCTAGCAGCAGCTCCAGCAGCCTGGAATC
TTCTGCCAGCGCTCTGATCGGAGAGCCCCTACCAGAAATCAGCCTCAGG
CTCCTGGCGTGGAAGCTAGCGGAGCTGGCGAAGCTAGAGCCTCTACAGG
CAGCTCTGATAGCTCTCCTGGCGGCCACGGCACCCAAGTGAATGTGACC
TGTATCGTGAACGTGTGCAGCTCCTCCGACCACAGCAGCCAGTGTAGCT
CTCAGGCCAGCAGCACCATGGGCGATACAGATAGCAGCCCTAGCGAGAG
CCCCAAGGATGAACAGGTGCCCTTCAGCAAAGAGGAATGCGCCTTCAGA
AGCCAGCTGGAAACCCCTGAGACACTGCTGGGCAGCACCGAGGAAAAAC
CTCTGCCACTGGGAGTGCCCCGACGCCGGAATGAAGCCTAGCAGAGTGA
AGTTCAGCAGAAGCGCCGACGCTCCCGCCTATAAGCAGGGACAGAACCA
GCTGTACAACGAGCTGAATCTGGGGCGCAGAGAAGAGTACGATGTGCTG
GACAAGCGGAGAGGCAGAGATCCTGAGATGGGCGGCAAGCCCAGACGGA
AGAATCCTCAAGAGGGCCTGTATAATGAGCTGCAGAAAGACAAGATGGC
CGAGGCCTACAGCGAGATCGGCATGAAGGGCGAGCGCAGAAGAGGCAAG
GGACACGATGGACTGTATCAGGGCCTGAGCACCGCCACCAAGGATACCT
ATGATGCCCTGCACATGCAGGCCCTGCCTCCAAGA

[0316] An exemplary protein sequence encoding a CSR BBBz protein of the disclosure comprises or consists of the amino acid sequence of (IL2RB signal peptide, IL2RB extra cellular domain, IL2RB transmembrane domain, IL2RB intracellular domain #1, CD3z intracellular domain #2):

(SEQ ID NO: 19)
MAAPALSWRLPLLILLLPLATSWASAAVNGTSQFTCFYNSRANISCVWSQDGALQDTSCQVH
AWPDRRRWNQTCELLPVSQASWACNLILGAPDSQKLTTVDIVTLRVLCREGVRWRVMAIQDF
KPFENLRLMAPISLQVVHVETHRCNISWEISQASHYFERHLEFEARTLSPGHTWEEAPLLTL
KQKQEWICLETLTPDTQYEFQVRVKPLQGEFTTWSPWSQPLAFRTKPAALGKDTIPWLGHLL
VGLSGAFGFIILVYLLINCRNTGPWLKKVLKCNTPDPSKFFSQLSSEHGGDVQKWLSSPFPS
SSFSPGGLAPEISPLEVLERDKVTQLLLQQDKVPEPASLSSNHSLTSCFTNQGYFFFHLPDA
LEIEACQVYFTYDPYSEEDPDEGVAGAPTGSSPQPLQPLSGEDDAYCTFPSRDDLLLFSPSL
LGGPSPPSTAPGGSGAGEERMPPSLQERVPRDWDPQPLGPPTPGVPDLVDFQPPPELVLREA
GEEVPDAGPREGVSFPWSRPPGQGEFRALNARLPLNTDAYLSLQELQGQDPTHLVRVKFSRS
ADAPAYKQGQNQLYNELNLGRREEYDVLDKRRGRDPEMGGKPRRKNPQEGLYNELQKDKMAE
AYSEIGMKGERRRGKGHDGLYQGLSTATKDTYDALHMQALPPR

[0317] An exemplary nucleotide sequence encoding a CSR BBBz protein of the disclosure comprises or consists of the amino acid sequence of (IL2RB signal peptide, IL2RB extra cellular domain, IL2RB transmembrane domain, IL2RB intracellular domain #1, CD3z intracellular domain #2):

(SEQ ID NO: 174)
ATGGCTGCCCCTGCTCTGTCTTGGAGACTGCCTCTGCTGATCCTGCTGCTGCCTCTGGCTAC
ATCTTGGGCCTCTGCCGCCGTGAATGGCACCAGCCAGTTCACCTGTTTCTACAACAGCCGGG
CCAACATCAGCTGCGTGTGGTCACAAGATGGCGCCCTGCAGGATACCAGCTGTCAGGTTCAC
GCCTGGCCTGATCGGAGAAGATGGAACCAGACATGCGAGCTGCTGCCCGTGTCTCAGGCTAG
CTGGGCCTGTAATCTGATCCTGGGAGCCCCTGACAGCCAGAAACTGACCACAGTGGACATCG
TGACCCTGCGGGTGCTGTGTAGAGAAGGCGTTCGTTGGAGAGTGATGGCCATTCAGGACTTC
AAGCCCTTCGAGAACCTGCGGCTGATGGCCCCAATTAGCCTGCAGGTTGTGCACGTGGAAAC
CCACCGGTGCAATATCAGCTGGGAGATCAGCCAGGCCAGCCACTACTTCGAGCGGCACCTGG
AATTCGAGGCCAGAACACTGAGCCCTGGCCACACCTGGGAAGAAGCTCCTCTGCTCACCCTG
AAGCAGAAACAAGAGTGGATCTGCCTGGAAACCCTGACACCTGACACACAGTACGAGTTCCA
AGTGCGCGTGAAGCCTCTCCAGGGCGAGTTTACAACATGGTCCCCTTGGAGTCAGCCCCTGG
CCTTTAGAACAAAGCCTGCCGCTCTGGGCAAAGACACAATCCCGGGGCGGGGCCAACGGCGC
GTTGGACTGTCTGGCGCCTTCGGCTTCATCATCCTGGTGTACCTGCTGATCAACTGCCGGAA
CACAGGCCCCTGGCTGAAGAAAGTGCTGAAGTGCAACACCCCTGATCCGAGCAAGTTCTTTA
GCCAGCTGAGCAGCGAGCATGGCGGCGACGTTCAGAAATGGCTGTCTAGCCCATTTCCTAGC
AGCAGCTTCAGCCCTGGTGGACTGGCCCCTGAGATTAGCCCTCTGGAAGTGCTGGAACGGGA
CAAAGTGACCCAGCTGCTTCTGCAGCAGGACAAGGTGCCAGAACCTGCCAGCCTGTCCAGCA
ATCACAGCCTGACCAGCTGTTTTACAAACCAGGGCTACTTCTTCTTCCATCTGCCTGACGCA
CTGGAAATTGAGGCCTGCCAGGTGTACTTCACCTACGATCCCTACAGCGAAGAGGACCCCGA
TGAAGGTGTTGCCGGTGCTCCTACCGGAAGCTCTCCTCAACCTCTGCAACCACTGAGCGGCG
AGGATGACGCCTACTGCACATTCCCCAGCAGAGATGACCTGCTCCTGTTCAGCCCTTCTCTG
CTCGGCGGACCTTCTCCACCATCTACAGCTCCAGGTGGAAGCGGAGCCGGCGAGGAAAGAAT
GCCTCCAAGCCTGCAAGAGCGGGTGCCCAGAGATTGGGATCCTCAACCACTGGGCCCTCCAA
CACCTGGCGTGCCAGATCTCGTGGATTTCCAGCCTCCTCCAGAGCTGGTGCTGAGAGAAGCT
GGCGAAGAAGTGCCAGACGCTGGCCCTAGAGAGGGCGTTAGCTTTCCTTGGAGCAGACCTCC
TGGACAGGGCGAATTCAGAGCCCTGAATGCCAGACTGCCCCTGAACACCGATGCCTACCTGT
CTCTGCAAGAACTGCAGGGACAAGACCCCACACACCTCGTGCGAGTGAAGTTCAGCAGAAGC
GCTGACGCCCCTGCCTACAAGCAGGGACAGAACCAGCTGTACAACGAGCTGAACCTGGGGAG
AAGAGAAGAGTACGACGTGCTGGACAAGCGGAGAGGCAGAGATCCTGAGATGGGCGGCAAGC
CCAGACGGAAGAATCCTCAAGAGGGCCTGTATAATGAGCTGCAGAAAGATAAGATGGCCGAG
GCCTACTCCGAGATCGGCATGAAGGGCGAGCGCAGAAGAGGCAAGGGACACGATGGACTGTA
CCAGGGCCTGAGCACCGCCACCAAGGATACCTATGATGCCCTGCACATGCAGGCCCTGCCAC
CTAGA

[0318] An exemplary protein sequence encoding a CSR 2BB protein of the disclosure comprises or consists of the amino acid sequence of (CD2 signal peptide, CD2 extra cellular domain (D111H), IL2RB transmembrane domain, IL2RB intracellular domain):

(SEQ ID NO: 20)
MSFPCKFVASFLLIFNVSSKGAVSKEITNALETWGALGQDINLDTPSFQMSDDIDDTKWEKT
SDKKKIAQFRKEKETFKEKDTYKLFKNGTLKIKHLKTDDQDIYKVSIYHTKGKNVLEKIFDL
KIQERVSKPKISWTCINTTLTCEVMNGTDPELNLYQDGKHLKLSQRVITHKWTTSLSAKFKC
TAGNKVSKESSVEPVSCPEKGLDIPWLGHLLVGLSGAFGFIILVYLLINCRNTGPWLKKVLK
CNTPDPSKFFSQLSSEHGGDVQKWLSSPFPSSSFSPGGLAPEISPLEVLERDKVTQLLLQQD
KVPEPASLSSNHSLTSCFTNQGYFFFHLPDALEIEACQVYFTYDPYSEEDPDEGVAGAPTGS
SPQPLQPLSGEDDAYCTFPSRDDLLLFSPSLLGGPSPPSTAPGGSGAGEERMPPSLQERVPR
DWDPQPLGPPTPGVPDLVDFQPPPELVLREAGEEVPDAGPREGVSFPWSRPPGQGEFRALNA
RLPLNTDAYLSLQELQGQDPTHLV

[0319] An exemplary nucleotide sequence encoding a CSR 2BB protein of the disclosure comprises or consists of the amino acid sequence of (CD2 signal peptide, CD2 extra cellular domain (D111H), IL2RB transmembrane domain, IL2RB intracellular domain):

(SEQ ID NO: 175)
ATGAGCTTCCCTTGCAAGTTCGTGGCCAGCTTCCTGCTGATCTTCAACGTGTCCTCTAAGGG
CGCCGTGTCCAAAGAGATCACAAACGCCCTGGAAACCTGGGGAGCCCTCGGCCAGGATATTA
ACCTGGACATCCCCAGCTTCCAGATGAGCGACGACATCGATGACATCAAGTGGGAGAAAACC
AGCGACAAGAAGAAGATCGCCCAGTTCCGGAAAGAGAAAGAGACATTCAAAGAGAAGGACAC
CTACAAGCTGTTCAAGAACGGCACCCTGAAGATCAAGCACCTGAAAACCGACGACCAGGACA
TCTATAAGGTGTCCATCTACCACACCAAGGGCAAGAACGTGCTGGAAAAGATCTTCGACCTC
AAGATCCAAGAGCGGGTGTCCAAGCCTAAGATCAGCTGGACCTGCATCAACACCACACTGAC
CTGCGAAGTGATGAACGGCACAGACCCCGAGCTGAACCTGTACCAGGATGGCAAACACCTGA
AGCTGAGCCAGCGCGTGATCACCCACAAGTGGACAACAAGCCTGAGCGCCAAGTTCAAGTGC
ACCGCCGGAAACAAAGTGTCTAAAGAGTCCAGCGTCGAGCCCGTGTCTTGCCCTGAAAAAGG
CCTGGACATTCCCTGGCTGGGCCATCTGCTTGTTGGACTGTCTGGCGCCTTCGGCTTCATCA
TCCTGGTGTATCTGCTGATCAACTGCCGGAACACAGGCCCCTGGCTGAAGAAAGTGCTGAAG
TGCAACACCCCTGATCCGAGCAAGTTCTTTAGCCAGCTGAGCAGCGAGCATGGCGGCGACGT
TCAGAAATGGCTGTCTAGCCCATTTCCTAGCAGCAGCTTCAGCCCTGGTGGACTGGCCCCTG
AGATTAGCCCTCTGGAAGTGCTGGAACGGGACAAAGTGACCCAGCTGCTCCTGCAGCAGGAT
AAGGTGCCAGAACCTGCCAGCCTGTCCAGCAATCACAGCCTGACCAGCTGCTTTACCAACCA
GGGCTACTTCTTCTTCCATCTGCCTGACGCTCTGGAAATCGAGGCCTGCCAGGTGTACTTCA
CCTACGATCCCTACAGCGAAGAGGACCCCGATGAAGGTGTTGCCGGTGCTCCTACCGGAAGC
TCTCCTCAACCTCTGCAACCACTGAGCGGCGAGGATGACGCCTACTGCACATTCCCCAGCAG
AGATGACCTGCTGCTGTTCAGCCCTTCTCTGCTCGGTGGACCTTCTCCACCTTCTACAGCAC
CTGGCGGATCTGGCGCAGGCGAGGAAAGAATGCCTCCTAGCCTGCAAGAGAGAGTGCCCAGA
GACTGGGATCCTCAGCCTCTCGGACCTCCTACACCAGGCGTGCCAGACCTGGTGGATTTTCA
GCCTCCTCCAGAGCTGGTGCTGAGAGAAGCTGGCGAAGAAGTGCCAGACGCCGGACCTAGAG
AGGGCGTTAGCTTTCCTTGGAGCAGACCTCCTGGACAGGGCGAGTTCAGAGCCCTGAATGCT
AGACTGCCCCTGAACACCGATGCCTACCTGTCTCTGCAAGAGCTGCAGGGACAAGACCCCAC
ACACCTGGTG

[0320] An exemplary protein sequence encoding a CSR 2BBz protein of the disclosure comprises or consists of the amino acid sequence of (CD2 signal peptide, CD2 extra cellular domain (D111H), IL2RB transmembrane domain, IL2RB intracellular domain #1, CD3z intracellular domain #2):

(SEQ ID NO: 21)
MSFPCKFVASFLLIFNVSSKGAVSKEITNALETWGALGQDINLDTPSFQMSDDIDDTKWEKT
SDKKKIAQFRKEKETFKEKDTYKLFKNGTLKIKHLKTDDQDIYKVSIYHTKGKNVLEKIFDL
KIQERVSKPKISWTCINTTLTCEVMNGTDPELNLYQDGKHLKLSQRVITHKWTTSLSAKFKC
TAGNKVSKESSVEPVSCPEKGLDIPWLGHLLVGLSGAFGFIILVYLLINCRNTGPWLKKVLK
CNTPDPSKFFSQLSSEHGGDVQKWLSSPFPSSSFSPGGLAPEISPLEVLERDKVTQLLLQQD
KVPEPASLSSNHSLTSCFTNQGYFFFHLPDALEIEACQVYFTYDPYSEEDPDEGVAGAPTGS
SPQPLQPLSGEDDAYCTFPSRDDLLLFSPSLLGGPSPPSTAPGGSGAGEERMPPSLQERVPR
DWDPQPLGPPTPGVPDLVDFQPPPELVLREAGEEVPDAGPREGVSFPWSRPPGQGEFRALNA
RLPLNTDAYLSLQELQGQDPTHLVRVKFSRSADAPAYKQGQNQLYNELNLGRREEYDVLDKR
RGRDPEMGGKPRRKNPQEGLYNELQKDKMAEAYSEIGMKGERRRGKGHDGLYQGLSTATKDT
YDALHMQALPPR

[0321] An exemplary nucleotide sequence encoding a CSR 2BBz protein of the disclosure comprises or consists of the amino acid sequence of (CD2 signal peptide, CD2 extra cellular domain (D111H), IL2RB transmembrane domain, IL2RB intracellular domain #1, CD3z intracellular domain #2):

(SEQ ID NO: 176)
ATGAGCTTCCCTTGCAAGTTCGTGGCCAGCTTCCTGCTGATCTTCAACGTGTCCTCTAAGGG
CGCCGTGTCCAAAGAGATCACAAACGCCCTGGAAACCTGGGGAGCCCTCGGCCAGGATATTA
ACCTGGACATCCCCAGCTTCCAGATGAGCGACGACATCGATGACATCAAGTGGGAGAAAACC
AGCGACAAGAAGAAGATCGCCCAGTTCCGGAAAGAGAAAGAGACATTCAAAGAGAAGGACAC
CTACAAGCTGTTCAAGAACGGCACCCTGAAGATCAAGCACCTGAAAACCGACGACCAGGACA
TCTATAAGGTGTCCATCTACCACACCAAGGGCAAGAACGTGCTGGAAAAGATCTTCGACCTC
AAGATCCAAGAGCGGGTGTCCAAGCCTAAGATCAGCTGGACCTGCATCAACACCACACTGAC
CTGCGAAGTGATGAACGGCACAGACCCCGAGCTGAACCTGTACCAGGATGGCAAACACCTGA
AGCTGAGCCAGCGCGTGATCACCCACAAGTGGACAACAAGCCTGAGCGCCAAGTTCAAGTGC
ACCGCCGGAAACAAAGTGTCTAAAGAGTCCAGCGTCGAGCCCGTGTCTTGCCCTGAAAAAGG
CCTGGACATTCCCTGGCTGGGCCATCTGCTTGTTGGACTGTCTGGCGCCTTCGGCTTCATCA
TCCTGGTGTATCTGCTGATCAACTGCCGGAACACAGGCCCCTGGCTGAAGAAAGTGCTGAAG
TGCAACACCCCTGATCCGAGCAAGTTCTTTAGCCAGCTGAGCAGCGAGCATGGCGGCGACGT
TCAGAAATGGCTGTCTAGCCCATTTCCTAGCAGCAGCTTCAGCCCTGGTGGACTGGCCCCTG
AGATTAGCCCTCTGGAAGTGCTGGAACGGGACAAAGTGACCCAGCTGCTCCTGCAGCAGGAT
AAGGTGCCAGAACCTGCCAGCCTGTCCAGCAATCACAGCCTGACCAGCTGCTTTACCAACCA
GGGCTACTTCTTCTTCCATCTGCCTGACGCTCTGGAAATCGAGGCCTGCCAGGTGTACTTCA
CCTACGATCCCTACAGCGAAGAGGACCCCGATGAAGGTGTTGCCGGTGCTCCTACCGGAAGC
TCTCCTCAACCTCTGCAACCACTGAGCGGCGAGGATGACGCCTACTGCACATTCCCCAGCAG
AGATGACCTGCTGCTGTTCAGCCCTTCTCTGCTCGGTGGACCTTCTCCACCTTCTACAGCAC
CTGGCGGATCTGGCGCAGGCGAGGAAAGAATGCCTCCTAGCCTGCAAGAGAGAGTGCCCAGA
GACTGGGATCCTCAGCCTCTCGGACCTCCTACACCAGGCGTGCCAGACCTGGTGGATTTTCA
GCCTCCTCCAGAGCTGGTGCTGAGAGAAGCTGGCGAAGAAGTGCCAGACGCCGGACCTAGAG
AGGGCGTTAGCTTTCCTTGGAGCAGACCTCCTGGACAGGGCGAGTTCAGAGCCCTGAATGCT
AGACTGCCCCTGAACACCGATGCCTACCTGTCTCTGCAAGAGCTGCAGGGACAAGACCCCAC
ACACCTCGTCAGAGTGAAGTTCAGCCGCAGCGCTGATGCCCCTGCCTACAAGCAGGGACAGA
ACCAGCTGTACAACGAGCTGAATCTGGGGCGCAGAGAAGAGTACGATGTGCTGGACAAGCGG
AGAGGCAGAGATCCTGAGATGGGCGGCAAGCCCAGACGGAAGAATCCTCAAGAGGGCCTGTA
TAATGAGCTGCAGAAAGACAAGATGGCCGAGGCCTACTCCGAGATCGGAATGAAGGGCGAGC
GCAGAAGAGGCAAGGGACACGATGGACTGTATCAGGGCCTGAGCACCGCCACCAAGGATACC
TATGATGCCCTGCACATGCAGGCCCTGCCTCCAAGA

[0322] An exemplary protein sequence encoding a CSR 22B protein of the disclosure comprises or consists of the amino acid sequence of (CD2 signal peptide, CD2 extra cellular domain (D111H), CD2 transmembrane domain, IL2RB intracellular domain):

(SEQ ID NO: 22)
MSFPCKFVASFLLIFNVSSKGAVSKEITNALETWGALGQDINLDTPSFQMSDDIDDTKWEKT
SDKKKIAQFRKEKETFKEKDTYKLFKNGTLKIKHLKTDDQDIYKVSIYHTKGKNVLEKIFDL
KIQERVSKPKISWTCINTTLTCEVMNGTDPELNLYQDGKHLKLSQRVITHKWTTSLSAKFKC
TAGNKVSKESSVEPVSCPEKGLDIYLIIGICGGGSLLMVFVALLVFYITNCRNTGPWLKKVL
KCNTPDPSKFFSQLSSEHGGDVQKWLSSPFPSSSFSPGGLAPEISPLEVLERDKVTQLLLQQ
DKVPEPASLSSNHSLTSCFTNQGYFFFHLPDALEIEACQVYFTYDPYSEEDPDEGVAGAPTG
SSPQPLQPLSGEDDAYCTFPSRDDLLLFSPSLLGGPSPPSTAPGGSGAGEERMPPSLQERVP
RDWDPQPLGPPTPGVPDLVDFQPPPELVLREAGEEVPDAGPREGVSFPWSRPPGQGEFRALN
ARLPLNTDAYLSLQELQGQDPTHLV

[0323] An exemplary nucleotide sequence encoding a CSR 22B protein of the disclosure comprises or consists of the amino acid sequence of (CD2 signal peptide, CD2 extra cellular domain (D111H), CD2 transmembrane domain, IL2RB intracellular domain):

(SEQ ID NO: 177)
ATGAGCTTCCCTTGCAAGTTCGTGGCCAGCTTCCTGCTGATCTTCAACGTGTCCTCTAAGGG
CGCCGTGTCCAAAGAGATCACAAACGCCCTGGAAACCTGGGGAGCCCTCGGCCAGGATATTA
ACCTGGACATCCCCAGCTTCCAGATGAGCGACGACATCGATGACATCAAGTGGGAGAAAACC
AGCGACAAGAAGAAGATCGCCCAGTTCCGGAAAGAGAAAGAGACATTCAAAGAGAAGGACAC
CTACAAGCTGTTCAAGAACGGCACCCTGAAGATCAAGCACCTGAAAACCGACGACCAGGACA
TCTATAAGGTGTCCATCTACCACACCAAGGGCAAGAACGTGCTGGAAAAGATCTTCGACCTC
AAGATCCAAGAGCGGGTGTCCAAGCCTAAGATCAGCTGGACCTGCATCAACACCACACTGAC
CTGCGAAGTGATGAACGGCACAGACCCCGAGCTGAACCTGTACCAGGATGGCAAACACCTGA
AGCTGAGCCAGCGCGTGATCACCCACAAGTGGACAACAAGCCTGAGCGCCAAGTTCAAGTGC
ACCGCCGGAAACAAAGTGTCTAAAGAGTCCAGCGTCGAGCCCGTGTCTTGCCCTGAAAAAGG
ACTGGACATCTACCTGATCATCGGCATCTGTGGCGGCGGAAGCCTGCTGATGGTGTTTGTGG
CTCTGCTGGTGTTCTACATCACCAACTGCCGGAACACAGGCCCCTGGCTGAAGAAAGTGCTG
AAGTGCAACACCCCTGATCCGAGCAAGTTCTTTAGCCAGCTGAGCAGCGAGCATGGCGGCGA
CGTTCAGAAATGGCTGTCTAGCCCATTTCCTAGCAGCAGCTTCAGCCCTGGTGGACTGGCCC
CTGAGATTAGCCCTCTGGAAGTGCTGGAACGGGACAAAGTGACCCAGCTGCTCCTGCAGCAG
GATAAGGTGCCAGAACCTGCCAGCCTGTCCAGCAATCACAGCCTGACCAGCTGCTTTACCAA
CCAGGGCTACTTCTTCTTCCATCTGCCTGACGCTCTGGAAATCGAGGCCTGCCAGGTGTACT
TCACCTACGATCCCTACAGCGAAGAGGACCCCGATGAAGGTGTTGCCGGTGCTCCTACCGGA
AGCTCTCCTCAACCTCTGCAACCACTGAGCGGCGAGGATGACGCCTACTGCACATTCCCCAG
CAGAGATGACCTGCTGCTGTTCAGCCCTTCTCTGCTCGGTGGACCTTCTCCACCTTCTACAG
CACCTGGCGGATCTGGCGCAGGCGAGGAAAGAATGCCTCCTAGCCTGCAAGAGAGAGTGCCC
AGAGACTGGGATCCTCAGCCTCTCGGACCTCCTACACCAGGCGTGCCAGACCTGGTGGATTT
TCAGCCTCCTCCAGAGCTGGTGCTGAGAGAAGCTGGCGAAGAAGTGCCAGACGCCGGACCTA
GAGAGGGCGTTAGCTTTCCTTGGAGCAGACCTCCTGGACAGGGCGAGTTCAGAGCCCTGAAT
GCTAGACTGCCCCTGAACACCGATGCCTACCTGTCTCTGCAAGAGCTGCAGGGACAAGACCC
CACACACCTGGTG

[0324] An exemplary protein sequence encoding a CSR 22Bz protein of the disclosure comprises or consists of the amino acid sequence of (CD2 signal peptide, CD2 extra cellular domain (D111H), CD2 transmembrane domain, IL2RB intracellular domain #1, CD3z intracellular domain #2):

(SEQ ID NO: 23)
MSFPCKFVASFLLIFNVSSKGAVSKEITNALETWGALGQDINLDTPSFQMSDDIDDTKWEKT
SDKKKIAQFRKEKETFKEKDTYKLFKNGTLKIKHLKTDDQDIYKVSIYHTKGKNVLEKIFDL
KIQERVSKPKISWTCINTTLTCEVMNGTDPELNLYQDGKHLKLSQRVITHKWTTSLSAKFKC
TAGNKVSKESSVEPVSCPEKGLDIYLIIGICGGGSLLMVFVALLVFYITNCRNTGPWLKKVL
KCNTPDPSKFFSQLSSEHGGDVQKWLSSPFPSSSFSPGGLAPEISPLEVLERDKVTQLLLQQ
DKVPEPASLSSNHSLTSCFTNQGYFFFHLPDALEIEACQVYFTYDPYSEEDPDEGVAGAPTG
SSPQPLQPLSGEDDAYCTFPSRDDLLLFSPSLLGGPSPPSTAPGGSGAGEERMPPSLQERVP
RDWDPQPLGPPTPGVPDLVDFQPPPELVLREAGEEVPDAGPREGVSFPWSRPPGQGEFRALN
ARLPLNTDAYLSLQELQGQDPTHLVRVKFSRSADAPAYKQGQNQLYNELNLGRREEYDVLDK
RRGRDPEMGGKPRRKNPQEGLYNELQKDKMAEAYSEIGMKGERRRGKGHDGLYQGLSTATKD
TYDALHMQALPPR

[0325] An exemplary nucleotide sequence encoding a CSR 22Bz protein of the disclosure comprises or consists of the amino acid sequence of (CD2 signal peptide, CD2 extra cellular domain (D111H), CD2 transmembrane domain, IL2RB intracellular domain #1, CD3z intracellular domain #2):

(SEQ ID NO: 178)
ATGAGCTTCCCTTGCAAGTTCGTGGCCAGCTTCCTGCTGATCTTCAACGTGTCCTCTAAGGG
CGCCGTGTCCAAAGAGATCACAAACGCCCTGGAAACCTGGGGAGCCCTCGGCCAGGATATTA
ACCTGGACATCCCCAGCTTCCAGATGAGCGACGACATCGATGACATCAAGTGGGAGAAAACC
AGCGACAAGAAGAAGATCGCCCAGTTCCGGAAAGAGAAAGAGACATTCAAAGAGAAGGACAC
CTACAAGCTGTTCAAGAACGGCACCCTGAAGATCAAGCACCTGAAAACCGACGACCAGGACA
TCTATAAGGTGTCCATCTACCACACCAAGGGCAAGAACGTGCTGGAAAAGATCTTCGACCTC
AAGATCCAAGAGCGGGTGTCCAAGCCTAAGATCAGCTGGACCTGCATCAACACCACACTGAC
CTGCGAAGTGATGAACGGCACAGACCCCGAGCTGAACCTGTACCAGGATGGCAAACACCTGA
AGCTGAGCCAGCGCGTGATCACCCACAAGTGGACAACAAGCCTGAGCGCCAAGTTCAAGTGC
ACCGCCGGAAACAAAGTGTCTAAAGAGTCCAGCGTCGAGCCCGTGTCTTGCCCTGAAAAAGG
ACTGGACATCTACCTGATCATCGGCATCTGTGGCGGCGGAAGCCTGCTGATGGTGTTTGTGG
CTCTGCTGGTGTTCTACATCACCAACTGCCGGAACACAGGCCCCTGGCTGAAGAAAGTGCTG
AAGTGCAACACCCCTGATCCGAGCAAGTTCTTTAGCCAGCTGAGCAGCGAGCATGGCGGCGA
CGTTCAGAAATGGCTGTCTAGCCCATTTCCTAGCAGCAGCTTCAGCCCTGGTGGACTGGCCC
CTGAGATTAGCCCTCTGGAAGTGCTGGAACGGGACAAAGTGACCCAGCTGCTCCTGCAGCAG
GATAAGGTGCCAGAACCTGCCAGCCTGTCCAGCAATCACAGCCTGACCAGCTGCTTTACCAA
CCAGGGCTACTTCTTCTTCCATCTGCCTGACGCTCTGGAAATCGAGGCCTGCCAGGTGTACT
TCACCTACGATCCCTACAGCGAAGAGGACCCCGATGAAGGTGTTGCCGGTGCTCCTACCGGA
AGCTCTCCTCAACCTCTGCAACCACTGAGCGGCGAGGATGACGCCTACTGCACATTCCCCAG
CAGAGATGACCTGCTGCTGTTCAGCCCTTCTCTGCTCGGTGGACCTTCTCCACCTTCTACAG
CACCTGGCGGATCTGGCGCAGGCGAGGAAAGAATGCCTCCTAGCCTGCAAGAGAGAGTGCCC
AGAGACTGGGATCCTCAGCCTCTCGGACCTCCTACACCAGGCGTGCCAGACCTGGTGGATTT
TCAGCCTCCTCCAGAGCTGGTGCTGAGAGAAGCTGGCGAAGAAGTGCCAGACGCCGGACCTA
GAGAGGGCGTTAGCTTTCCTTGGAGCAGACCTCCTGGACAGGGCGAGTTCAGAGCCCTGAAT
GCTAGACTGCCCCTGAACACCGATGCCTACCTGTCTCTGCAAGAGCTGCAGGGACAAGACCC
CACACACCTCGTCAGAGTGAAGTTCAGCCGCAGCGCTGATGCCCCTGCCTACAAGCAGGGAC
AGAACCAGCTGTACAACGAGCTGAATCTGGGGCGCAGAGAAGAGTACGATGTGCTGGACAAG
CGGAGAGGCAGAGATCCTGAGATGGGCGGCAAGCCCAGACGGAAGAATCCTCAAGAGGGCCT
GTATAATGAGCTGCAGAAAGACAAGATGGCCGAGGCCTACTCCGAGATCGGAATGAAGGGCG
AGCGCAGAAGAGGCAAGGGACACGATGGACTGTATCAGGGCCTGAGCACCGCCACCAAGGAT
ACCTATGATGCCCTGCACATGCAGGCCCTGCCTCCAAGA

[0326] An exemplary protein sequence encoding a CSR GGGz protein of the disclosure comprises or consists of the amino acid sequence of (IL2RG signal peptide, IL2RG extra cellular domain, IL2RG transmembrane domain, IL2RG intracellular domain #1, CD3z intracellular domain #2):

(SEQ ID NO: 24)
MLKPSLPFTSLLFLQLPLLGVGLNTTTLTPNGNEDTTADFFLTTMPTDSLSVSTLPLPEVQC
FVFNVEYMNCTWNSSSEPQPTNLTLHYWYKNSDNDKVQKCSHYLFSEEITSGCQLQKKEIHL
YQTFVVQLQDPREPRRQATQMLKLQNLVIPWAPENLTLHKLSESQLELNWNNRFLNHCLEHL
VQYRTDWDHSWTEQSVDYRHKFSLPSVDGQKRYTFRVRSRFNPLCGSAQHWSEWSHPIHWGS
NTSKENPFLFALEAVVISVGSMGLIISLLCVYFWLERTMPRIPTLKNLEDLVTEYHGNFSAW
SGVSKGLAESLQPDYSERLCLVSEIPPKGGALGEGPGASPCNQHSPYWAPPCYTLKPETRVK
FSRSADAPAYKQGQNQLYNELNLGRREEYDVLDKRRGRDPEMGGKPRRKNPQEGLYNELQKD
KMAEAYSEIGMKGERRRGKGHDGLYQGLSTATKDTYDALHMQALPPR

[0327] An exemplary nucleotide sequence encoding a CSR GGGz protein of the disclosure comprises or consists of the amino acid sequence of (IL2RG signal peptide, IL2RG extra cellular domain, IL2RG transmembrane domain, IL2RG intracellular domain #1, CD3z intracellular domain #2):

(SEQ ID NO: 179)
ATGCTGAAGCCCAGCCTGCCTTTTACCAGCCTGCTGTTCCTGCAGCTGCCTCTGCTTGGCGT
GGGCCTGAATACCACCATCCTGACACCTAACGGCAACGAGGATACAACCGCCGACTTCTTCC
TGACCACCATGCCTACCGATAGCCTGAGCGTGTCCACACTGCCACTGCCTGAGGTGCAGTGC
TTCGTGTTCAACGTCGAGTACATGAACTGCACCTGGAACAGCTCCAGCGAGCCCCAGCCTAC
CAATCTGACACTGCACTACTGGTACAAGAACAGCGACAACGACAAGGTGCAGAAGTGCAGCC
ACTACCTGTTCAGCGAGGAAATCACCAGCGGCTGCCAGCTGCAGAAGAAAGAGATCCACCTG
TACCAGACCTTCGTGGTGCAGCTCCAGGATCCTAGAGAGCCTAGAAGGCAGGCCACACAGAT
GCTGAAACTGCAGAACCTGGTCATCCCCTGGGCTCCCGAAAACCTGACTCTGCACAAGCTGA
GCGAGAGCCAGCTGGAACTGAACTGGAACAACCGGTTCCTGAATCACTGCCTGGAACACCTG
GTGCAGTACCGGACCGATTGGGATCACAGCTGGACAGAGCAGAGCGTGGACTACCGGCACAA
GTTCAGCCTGCCATCTGTGGACGGCCAGAAGCGGTACACCTTTAGAGTGCGGAGCCGGTTCA
ATCCCCTGTGTGGATCTGCTCAGCATTGGAGCGAGTGGTCACACCCTATCCACTGGGGCAGC
AACACCAGCAAAGAGAACCCCTTCCTGTTCGCCCTGGAAGCCGTGGTTATCAGCGTGGGCTC
TATGGGCCTGATCATCTCCCTGCTGTGCGTGTACTTCTGGCTGGAAAGAACCATGCCTCGGA
TCCCCACACTGAAGAATCTGGAAGATCTGGTCACCGAGTACCACGGCAACTTCAGTGCTTGG
AGCGGCGTGTCAAAAGGCCTGGCCGAATCTCTGCAGCCCGACTACTCTGAGAGACTGTGCCT
GGTGTCTGAGATCCCTCCTAAAGGCGGAGCCCTCGGAGAAGGACCTGGCGCCTCTCCATGTA
ATCAGCACAGCCCTTATTGGGCCCCTCCTTGCTACACCCTGAAGCCTGAGACAAGAGTGAAG
TTCAGCAGAAGCGCCGACGCTCCCGCCTATAAGCAGGGACAGAACCAGCTGTACAACGAGCT
GAACCTGGGGAGAAGAGAAGAGTACGACGTGCTGGACAAGCGGAGAGGCAGAGATCCTGAGA
TGGGCGGCAAGCCCAGACGGAAGAATCCTCAAGAGGGCCTGTATAATGAGCTGCAAAAGGAC
AAGATGGCCGAGGCCTACAGCGAGATCGGAATGAAGGGCGAGCGCAGAAGAGGCAAGGGACA
CGATGGACTGTACCAGGGCCTGAGCACCGCCACCAAGGATACCTATGATGCCCTGCACATGC
AGGCCCTGCCTCCAAGA

[0328] An exemplary protein sequence encoding a CSR 2GG protein of the disclosure comprises or consists of the amino acid sequence of (CD2 signal peptide, CD2 extra cellular domain (D111H), IL2RG transmembrane domain, IL2RG intracellular domain):

(SEQ ID NO: 25)
MSFPCKFVASFLLIFNVSSKGAVSKEITNALETWGALGQDINLDTPSFQMSDDIDDTKWEKT
SDKKKIAQFRKEKETFKEKDTYKLFKNGTLKIKHLKTDDQDIYKVSIYHTKGKNVLEKIFDL
KIQERVSKPKISWTCINTTLTCEVMNGTDPELNLYQDGKHLKLSQRVITHKWTTSLSAKFKC
TAGNKVSKESSVEPVSCPEKGLDAVVISVGSMGLIISLLCVYFWLERTMPRIPTLKNLEDLV
TEYHGNFSAWSGVSKGLAESLQPDYSERLCLVSEIPPKGGALGEGPGASPCNQHSPYWAPPC
YTLKPET

[0329] An exemplary nucleotide sequence encoding a CSR 2GG protein of the disclosure comprises or consists of the amino acid sequence of (CD2 signal peptide, CD2 extra cellular domain (D111H), IL2RG transmembrane domain, IL2RG intracellular domain)

(SEQ ID NO: 180)
ATGAGCTTCCCTTGCAAGTTCGTGGCCAGCTTCCTGCTGATCTTCAACGTGTCCTCTAAGGG
CGCCGTGTCCAAAGAGATCACAAACGCCCTGGAAACCTGGGGAGCCCTCGGCCAGGATATTA
ACCTGGACATCCCCAGCTTCCAGATGAGCGACGACATCGATGACATCAAGTGGGAGAAAACC
AGCGACAAGAAGAAGATCGCCCAGTTCCGGAAAGAGAAAGAGACATTCAAAGAGAAGGACAC
CTACAAGCTGTTCAAGAACGGCACCCTGAAGATCAAGCACCTGAAAACCGACGACCAGGACA
TCTATAAGGTGTCCATCTACCACACCAAGGGCAAGAACGTGCTGGAAAAGATCTTCGACCTC
AAGATCCAAGAGCGGGTGTCCAAGCCTAAGATCAGCTGGACCTGCATCAACACCACACTGAC
CTGCGAAGTGATGAACGGCACAGACCCCGAGCTGAACCTGTACCAGGATGGCAAACACCTGA
AGCTGAGCCAGCGCGTGATCACCCACAAGTGGACAACAAGCCTGAGCGCCAAGTTCAAGTGC
ACCGCCGGAAACAAAGTGTCTAAAGAGTCCAGCGTCGAGCCCGTGTCTTGCCCTGAGAAAGG
ACTGGATGCCGTGGTCATCAGCGTGGGCTCTATGGGCCTGATCATCAGCCTGCTGTGCGTGT
ACTTCTGGCTGGAACGGACCATGCCTCGGATCCCCACACTGAAGAACCTGGAAGATCTGGTC
ACCGAGTACCACGGCAACTTCTCTGCTTGGAGCGGCGTCAGTAAAGGCCTGGCCGAATCTCT
GCAGCCCGACTACTCTGAGAGACTGTGCCTGGTGTCTGAGATCCCTCCTAAAGGCGGAGCCC
TTGGAGAAGGACCTGGCGCCTCTCCATGTAACCAGCACAGCCCTTATTGGGCCCCTCCTTGC
TACACTCTGAAGCCCGAGACA

[0330] An exemplary protein sequence encoding a CSR 2GGz protein of the disclosure comprises or consists of the amino acid sequence of (CD2 signal peptide, CD2 extra cellular domain (D111H), IL2RG transmembrane domain, IL2RG intracellular domain #1, CD3z intracellular domain #2):

(SEQ ID NO: 26)
MSFPCKFVASFLLIFNVSSKGAVSKEITNALETWGALGQDINLDTPSFQ
MSDDIDDTKWEKTSDKKKIAQFRKEKETFKEKDTYKLFKNGTLKIKHLK
TDDQDIYKVSIYHTKGKNVLEKIFDLKIQERVSKPKISWTCINTTLTCE
VMNGTDPELNLYQDGKHLKLSQRVITHKWTTSLSAKFKCTAGNKVSKES
SVEPVSCPEKGLDAVVISVGSMGLIISLLCVYFWLERTMPRIPTLKNLE
DLVTEYHGNFSAWSGVSKGLAESLQPDYSERLCLVSEIPPKGGALGEGP
GASPCNQHSPYWAPPCYTLKPETRVKFSRSADAPAYKQGQNQLYNELNL
GRREEYDVLDKRRGRDPEMGGKPRRKNPQEGLYNELQKDKMAEAYSEIG
[sequence omitted]

[0331] An exemplary nucleotide sequence encoding a CSR 2GGz protein of the disclosure comprises or consists of the amino acid sequence of (CD2 signal peptide, CD2 extra cellular domain (D111H), IL2RG transmembrane domain, IL2RG intracellular domain #1, CD3z intracellular domain #2):

(SEQ ID NO: 181)
ATGAGCTTCCCTTGCAAGTTCGTGGCCAGCTTCCTGCTGATCTTCAACGTGTCCTCTAAGGG
CGCCGTGTCCAAAGAGATCACAAACGCCCTGGAAACCTGGGGAGCCCTCGGCCAGGATATTA
ACCTGGACATCCCCAGCTTCCAGATGAGCGACGACATCGATGACATCAAGTGGGAGAAAACC
AGCGACAAGAAGAAGATCGCCCAGTTCCGGAAAGAGAAAGAGACATTCAAAGAGAAGGACAC
CTACAAGCTGTTCAAGAACGGCACCCTGAAGATCAAGCACCTGAAAACCGACGACCAGGACA
TCTATAAGGTGTCCATCTACCACACCAAGGGCAAGAACGTGCTGGAAAAGATCTTCGACCTC
AAGATCCAAGAGCGGGTGTCCAAGCCTAAGATCAGCTGGACCTGCATCAACACCACACTGAC
CTGCGAAGTGATGAACGGCACAGACCCCGAGCTGAACCTGTACCAGGATGGCAAACACCTGA
AGCTGAGCCAGCGCGTGATCACCCACAAGTGGACAACAAGCCTGAGCGCCAAGTTCAAGTGC
ACCGCCGGAAACAAAGTGTCTAAAGAGTCCAGCGTCGAGCCCGTGTCTTGCCCTGAGAAAGG
ACTGGATGCCGTGGTCATCAGCGTGGGCTCTATGGGCCTGATCATCAGCCTGCTGTGCGTGT
ACTTCTGGCTGGAACGGACCATGCCTCGGATCCCCACACTGAAGAACCTGGAAGATCTGGTC
ACCGAGTACCACGGCAACTTCTCTGCTTGGAGCGGCGTCAGTAAAGGCCTGGCCGAATCTCT
GCAGCCCGACTACTCTGAGAGACTGTGCCTGGTGTCTGAGATCCCTCCTAAAGGCGGAGCCC
TTGGAGAAGGACCTGGCGCCTCTCCATGTAACCAGCACAGCCCTTATTGGGCCCCTCCTTGC
TACACTCTGAAGCCCGAGACAAGAGTGAAGTTCAGCAGATCCGCCGAGGCTCCCGCCTATAA
GCAGGGACAGAACCAGCTGTACAACGAGCTGAATCTGGGGCGCAGAGAAGAGTACGATGTGC
TGGACAAGCGGAGAGGCAGAGATCCTGAGATGGGCGGCAAGCCCAGACGGAAGAATCCTCAA
GAGGGCCTGTATAATGAGCTGCAGAAAGACAAGATGGCCGAGGCCTACAGCGAGATCGGAAT
GAAGGGCGAGCGCAGAAGAGGCAAGGGACACGATGGACTGTATCAGGGCCTGAGCACCGCCA
CCAAGGATACCTATGATGCCCTGCACATGCAGGCCCTGCCTCCAAGA

[0332] An exemplary protein sequence encoding a CSR 22G protein of the disclosure comprises or consists of the amino acid sequence of (CD2 signal peptide, CD2 extra cellular domain (D111H), CD2 transmembrane domain, IL2RG intracellular domain):

(SEQ ID NO: 27)
MSFPCKFVASFLLIFNVSSKGAVSKEITNALETWGALGQDINLDTPSFQMSDDIDDTKWEKT
SDKKKIAQFRKEKETFKEKDTYKLFKNGTLKIKHLKTDDQDIYKVSIYHTKGKNVLEKIFDL
KIQERVSKPKISWTCINTTLTCEVMNGTDPELNLYQDGKHLKLSQRVITHKWTTSLSAKFKC
TAGNKVSKESSVEPVSCPEKGLDIYEIIGICGGGSLLMVFVALLVFYITERTMPRIPTLKNL
EDLVTEYHGNFSAWSGVSKGLAESLQPDYSERLCLVSEIPPKGGALGEGPGASPCNQHSPYW
APPCYTLKPET

[0333] An exemplary nucleotide sequence encoding a CSR 22G protein of the disclosure comprises or consists of the amino acid sequence of (CD2 signal peptide, CD2 extra cellular domain (D111H), CD2 transmembrane domain, IL2RG intracellular domain):

(SEQ ID NO: 182)
ATGAGCTTCCCTTGCAAGTTCGTGGCCAGCTTCCTGCTGATCTTCAACGTGTCCTCTAAGGG
CGCCGTGTCCAAAGAGATCACAAACGCCCTGGAAACCTGGGGAGCCCTCGGCCAGGATATTA
ACCTGGACATCCCCAGCTTCCAGATGAGCGACGACATCGATGACATCAAGTGGGAGAAAACC
AGCGACAAGAAGAAGATCGCCCAGTTCCGGAAAGAGAAAGAGACATTCAAAGAGAAGGACAC
CTACAAGCTGTTCAAGAACGGCACCCTGAAGATCAAGCACCTGAAAACCGACGACCAGGACA
TCTATAAGGTGTCCATCTACCACACCAAGGGCAAGAACGTGCTGGAAAAGATCTTCGACCTC
AAGATCCAAGAGCGGGTGTCCAAGCCTAAGATCAGCTGGACCTGCATCAACACCACACTGAC
CTGCGAAGTGATGAACGGCACAGACCCCGAGCTGAACCTGTACCAGGATGGCAAACACCTGA
AGCTGAGCCAGCGCGTGATCACCCACAAGTGGACAACAAGCCTGAGCGCCAAGTTCAAGTGC
ACCGCCGGAAACAAAGTGTCTAAAGAGTCCAGCGTCGAGCCCGTGTCTTGCCCTGAAAAAGG
ACTGGACATCTACCTGATCATCGGCATCTGTGGCGGCGGAAGCCTGCTGATGGTGTTTGTGG
CTCTGCTGGTGTTCTACATCACCGAGCGGACCATGCCTCGGATCCCCACACTGAAGAACCTG
GAAGATCTGGTCACCGAGTACCACGGCAACTTCTCTGCTTGGAGCGGCGTCAGTAAAGGCCT
GGCCGAATCTCTGCAGCCCGACTACTCTGAGAGACTGTGCCTGGTGTCTGAGATCCCTCCTA
AAGGCGGAGCCCTTGGAGAAGGACCTGGCGCCTCTCCATGTAACCAGCACAGCCCTTATTGG
GCCCCTCCTTGCTACACTCTGAAGCCCGAGACA

[0334] An exemplary protein sequence encoding a CSR 22 Gz protein of the disclosure comprises or consists of the amino acid sequence of (CD2 signal peptide, CD2 extra cellular domain (D111H), CD2 transmembrane domain, IL2RG intracellular domain #1, CD3z intracellular domain #2):

(SEQ ID NO: 28)
MSFPCKFVASFLLIFNVSSKGAVSKEITNALETWGALGQDINLDTPSFQMSDDIDDTKWEKT
SDKKKIAQFRKEKETFKEKDTYKLFKNGTLKIKHLKTDDQDIYKVSIYHTKGKNVLEKIFDL
KIQERVSKPKISWTCINTTLTCEVMNGTDPELNLYQDGKHLKLSQRVITHKWTTSLSAKFKC
TAGNKVSKESSVEPVSCPEKGLDIYEIIGICGGGSLLMVFVALLVFYITERTMPRIPTLKNL
EDLVTEYHGNFSAWSGVSKGLAESLQPDYSERLCLVSEIPPKGGALGEGPGASPCNQHSPYW
APPCYTLKPETRVKFSRSADAPAYKQGQNQLYNELNLGRREEYDVLDKRRGRDPEMGGKPRR
KNPQEGLYNELQKDKMAEAYSEIGMKGERRRGKGHDGLYQGLSTATKDTYDALHMQALPPR

[0335] An exemplary nucleotide sequence encoding a CSR 22 Gz protein of the disclosure comprises or consists of the amino acid sequence of (CD2 signal peptide, CD2 extra cellular domain (D111H), CD2 transmembrane domain, IL2RG intracellular domain #1, CD3z intracellular domain #2):

(SEQ ID NO: 183)
ATGAGCTTCCCTTGCAAGTTCGTGGCCAGCTTCCTGCTGATCTTCAACGTGTCCTCTAAGGG
CGCCGTGTCCAAAGAGATCACAAACGCCCTGGAAACCTGGGGAGCCCTCGGCCAGGATATTA
ACCTGGACATCCCCAGCTTCCAGATGAGCGACGACATCGATGACATCAAGTGGGAGAAAACC
AGCGACAAGAAGAAGATCGCCCAGTTCCGGAAAGAGAAAGAGACATTCAAAGAGAAGGACAC
CTACAAGCTGTTCAAGAACGGCACCCTGAAGATCAAGCACCTGAAAACCGACGACCAGGACA
TCTATAAGGTGTCCATCTACCACACCAAGGGCAAGAACGTGCTGGAAAAGATCTTCGACCTC
AAGATCCAAGAGCGGGTGTCCAAGCCTAAGATCAGCTGGACCTGCATCAACACCACACTGAC
CTGCGAAGTGATGAACGGCACAGACCCCGAGCTGAACCTGTACCAGGATGGCAAACACCTGA
AGCTGAGCCAGCGCGTGATCACCCACAAGTGGACAACAAGCCTGAGCGCCAAGTTCAAGTGC
ACCGCCGGAAACAAAGTGTCTAAAGAGTCCAGCGTCGAGCCCGTGTCTTGCCCTGAAAAAGG
ACTGGACATCTACCTGATCATCGGCATCTGTGGCGGCGGAAGCCTGCTGATGGTGTTTGTGG
CTCTGCTGGTGTTCTACATCACCGAGCGGACCATGCCTCGGATCCCCACACTGAAGAACCTG
GAAGATCTGGTCACCGAGTACCACGGCAACTTCTCTGCTTGGAGCGGCGTCAGTAAAGGCCT
GGCCGAATCTCTGCAGCCCGACTACTCTGAGAGACTGTGCCTGGTGTCTGAGATCCCTCCTA
AAGGCGGAGCCCTTGGAGAAGGACCTGGCGCCTCTCCATGTAACCAGCACAGCCCTTATTGG
GCCCCTCCTTGCTACACTCTGAAGCCCGAGACAAGAGTGAAGTTCAGCAGATCCGCCGAGGC
TCCCGCCTATAAGCAGGGACAGAACCAGCTGTACAACGAGCTGAATCTGGGGCGCAGAGAAG
AGTACGATGTGCTGGACAAGCGGAGAGGCAGAGATCCTGAGATGGGCGGCAAGCCCAGACGG
AAGAATCCTCAAGAGGGCCTGTATAATGAGCTGCAGAAAGACAAGATGGCCGAGGCCTACAG
CGAGATCGGAATGAAGGGCGAGCGCAGAAGAGGCAAGGGACACGATGGACTGTATCAGGGCC
TGAGCACCGCCACCAAGGATACCTATGATGCCCTGCACATGCAGGCCCTGCCTCCAAGA

[0336] An exemplary protein sequence encoding a CSR 2BBG protein of the disclosure comprises or consists of the amino acid sequence of (CD2 signal peptide, CD2 extra cellular domain (D111H), IL2RB transmembrane domain, IL2RB intracellular domain #1, IL2RG intracellular domain #2):

(SEQ ID NO: 29)
MSFPCKFVASFLLIFNVSSKGAVSKEITNALETWGALGQDINLDTPSFQMSDDIDDTKWEKT
SDKKKIAQFRKEKETFKEKDTYKLFKNGTLKIKHLKTDDQDIYKVSIYHTKGKNVLEKIFDL
KIQERVSKPKISWTCINTTLTCEVMNGTDPELNLYQDGKHLKLSQRVITHKWTTSLSAKFKC
TAGNKVSKESSVEPVSCPEKGLDIPWLGHLLVGLSGAFGFIILVYLLINCRNTGPWLKKVLK
CNTPDPSKFFSQLSSEHGGDVQKWLSSPFPSSSFSPGGLAPEISPLEVLERDKVTQLLLQQD
KVPEPASLSSNHSLTSCFTNQGYFFFHLPDALEIEACQVYFTYDPYSEEDPDEGVAGAPTGS
SPQPLQPLSGEDDAYCTFPSRDDLLLFSPSLLGGPSPPSTAPGGSGAGEERMPPSLQERVPR
DWDPQPLGPPTPGVPDLVDFQPPPELVLREAGEEVPDAGPREGVSFPWSRPPGQGEFRALNA
RLPLNTDAYLSLQELQGQDPTHLVERTMPRIPTLKNLEDLVTEYHGNFSAWSGVSKGLAESL
QPDYSERLCLVSEIPPKGGALGEGPGASPCNQHSPYWAPPCYTLKPET

[0337] An exemplary nucleotide sequence encoding a CSR 2BBG protein of the disclosure comprises or consists of the amino acid sequence of (CD2 signal peptide, CD2 extra cellular domain (D111H), IL2RB transmembrane domain, IL2RB intracellular domain #1, IL2RG intracellular domain #2):

(SEQ ID NO: 184)
ATGAGCTTCCCTTGCAAGTTCGTGGCCAGCTTCCTGCTGATCTTCAACGTGTCCTCTAAGGG
CGCCGTGTCCAAAGAGATCACAAACGCCCTGGAAACCTGGGGAGCCCTCGGCCAGGATATTA
ACCTGGACATCCCCAGCTTCCAGATGAGCGACGACATCGATGACATCAAGTGGGAGAAAACC
AGCGACAAGAAGAAGATCGCCCAGTTCCGGAAAGAGAAAGAGACATTCAAAGAGAAGGACAC
CTACAAGCTGTTCAAGAACGGCACCCTGAAGATCAAGCACCTGAAAACCGACGACCAGGACA
TCTATAAGGTGTCCATCTACCACACCAAGGGCAAGAACGTGCTGGAAAAGATCTTCGACCTC
AAGATCCAAGAGCGGGTGTCCAAGCCTAAGATCAGCTGGACCTGCATCAACACCACACTGAC
CTGCGAAGTGATGAACGGCACAGACCCCGAGCTGAACCTGTACCAGGATGGCAAACACCTGA
AGCTGAGCCAGCGCGTGATCACCCACAAGTGGACAACAAGCCTGAGCGCCAAGTTCAAGTGC
ACCGCCGGAAACAAAGTGTCTAAAGAGTCCAGCGTCGAGCCCGTGTCTTGCCCTGAAAAAGG
CCTGGACATTCCCTGGCTGGGCCATCTGCTTGTTGGACTGTCTGGCGCCTTCGGCTTCATCA
TCCTGGTGTATCTGCTGATCAACTGCCGGAACACAGGCCCCTGGCTGAAGAAAGTGCTGAAG
TGCAACACCCCTGATCCGAGCAAGTTCTTTAGCCAGCTGAGCAGCGAGCATGGCGGCGACGT
TCAGAAATGGCTGTCTAGCCCATTTCCTAGCAGCAGCTTCAGCCCTGGTGGACTGGCCCCTG
AGATTAGCCCTCTGGAAGTGCTGGAACGGGACAAAGTGACCCAGCTGCTCCTGCAGCAGGAT
AAGGTGCCAGAACCTGCCAGCCTGTCCAGCAATCACAGCCTGACCAGCTGCTTTACCAACCA
GGGCTACTTCTTCTTCCATCTGCCTGACGCTCTGGAAATCGAGGCCTGCCAGGTGTACTTCA
CCTACGATCCCTACAGCGAAGAGGACCCCGATGAAGGTGTTGCCGGTGCTCCTACCGGAAGC
TCTCCTCAACCTCTGCAACCACTGAGCGGCGAGGATGACGCCTACTGCACATTCCCCAGCAG
AGATGACCTGCTGCTGTTCAGCCCTTCTCTGCTCGGTGGACCTTCTCCACCTTCTACAGCAC
CTGGCGGATCTGGCGCAGGCGAGGAAAGAATGCCTCCTAGCCTGCAAGAGAGAGTGCCCAGA
GACTGGGATCCTCAGCCTCTCGGACCTCCTACACCAGGCGTGCCAGACCTGGTGGATTTTCA
GCCTCCTCCAGAGCTGGTGCTGAGAGAAGCTGGCGAAGAAGTGCCAGACGCCGGACCTAGAG
AGGGCGTTAGCTTTCCTTGGAGCAGACCTCCTGGACAGGGCGAGTTCAGAGCCCTGAATGCT
AGACTGCCCCTGAACACCGATGCCTACCTGTCTCTGCAAGAGCTGCAGGGACAAGACCCCAC
ACATCTGGTGGAACGGAGCATGCCTAGAATGCCGAGACTGAAGAACCTGGAAGATCTGGTCA
CCGAGTACCACGGCAACTTCAGTGCTTGGAGCGGCGTCAGCAAAGGACTGGCCGAATCTCTG
CAGCCCGACTACAGCGAGAGACTGTGCCTGGTGTCTGAGATCCCTCCTAAAGGCGGAGCCCT
TGGAGAAGGACCTGGCGCCTCTCCATGTAACCAGCACAGCCCTTATTGGGCCCCTCCTTGCT
ACACTCTGAAGCCCGAGACA

[0338] An exemplary protein sequence encoding a CSR 2BBGz protein of the disclosure comprises or consists of the amino acid sequence of (CD2 signal peptide, CD2 extra cellular domain (D111H), IL2RB transmembrane domain, IL2RB intracellular domain #1, IL2RG intracellular domain #2, CD3z intracellular domain #3):

(SEQ ID NO: 30)
MSFPCKFVASFLLIFNVSSKGAVSKEITNALETWGALGQDINLDTPSFQMSDDIDDTKWEKT
SDKKKPAQFRKEKETFKEKDTYKEFKNGTEKPKHEKTDDQDPYKVSPYHTKGKNVEEKPFDP
KIQERVSKPKISWTCINTTLTCEVMNGTDPELNLYQDGKHLKLSQRVITHKWTTSLSAKFKC
TAGNKVSKESSVEPVSCPEKGLDIPWLGHLLVGLSGAFGFIILVYLLINCRNTGPWLKKVLK
CNTPDPSKFFSQLSSEHGGDVQKWLSSPFPSSSFSPGGLAPEISPLEVLERDKVTQLLLQQD
KVPEPASLSSNHSLTSCFTNQGYFFFHLPDALEIEACQVYFTYDPYSEEDPDEGVAGAPTGS
SPQPLQPLSGEDDAYCTFPSRDDLLLFSPSLLGGPSPPSTAPGGSGAGEERMPPSLQERVPR
DWDPQPLGPPTPGVPDLVDFQPPPELVLREAGEEVPDAGPREGVSFPWSRPPGQGEFRALNA
RLPLNTDAYLSLQELQGQDPTHLVERTMPRIPTLKNLEDLVTEYHGNFSAWSGVSKGLAESL
QPDYSERLCLVSEIPPKGGALGEGPGASPCNQHSPYWAPPCYTLKPETRVKFSRSADAPAYK
QGQNQLYNELNLGRREEYDVLDKRRGRDPEMGGKPRRKNPQEGLYNEEQKDKMAEAYSEPGM
KGERRRGKGHDGLYQGLSTATKDTYDALHMQALPPR

[0339] An exemplary nucleotide sequence encoding a CSR 2BBGz protein of the disclosure comprises or consists of the amino acid sequence of (CD2 signal peptide, CD2 extra cellular domain (D111H), IL2RB transmembrane domain, IL2RB intracellular domain #1, IL2RG intracellular domain #2, CD3z intracellular domain #3):

(SEQ ID NO: 185)
ATGAGCTTCCCTTGCAAGTTCGTGGCCAGCTTCCTGCTGATCTTCAACGTGTCCTCTAAGGG
CGCCGTGTCCAAAGAGATCACAAACGCCCTGGAAACCTGGGGAGCCCTCGGCCAGGATATTA
ACCTGGACATCCCCAGCTTCCAGATGAGCGACGACATCGATGACATCAAGTGGGAGAAAACC
AGCGACAAGAAGAAGATCGCCCAGTTCCGGAAAGAGAAAGAGACATTCAAAGAGAAGGACAC
CTACAAGCTGTTCAAGAACGGCACCCTGAAGATCAAGCACCTGAAAACCGACGACCAGGACA
TCTATAAGGTGTCCATCTACCACACCAAGGGCAAGAACGTGCTGGAAAAGATCTTCGACCTC
AAGATCCAAGAGCGGGTGTCCAAGCCTAAGATCAGCTGGACCTGCATCAACACCACACTGAC
CTGCGAAGTGATGAACGGCACAGACCCCGAGCTGAACCTGTACCAGGATGGCAAACACCTGA
AGCTGAGCCAGCGCGTGATCACCCACAAGTGGACAACAAGCCTGAGCGCCAAGTTCAAGTGC
ACCGCCGGAAACAAAGTGTCTAAAGAGTCCAGCGTCGAGCCCGTGTCTTGCCCTGAAAAAGG
CCTGGACATTCCCTGGCTGGGCCATCTGCTTGTTGGACTGTCTGGCGCCTTCGGCTTCATCA
TCCTGGTGTATCTGCTGATCAACTGCCGGAACACAGGCCCCTGGCTGAAGAAAGTGCTGAAG
TGCAACACCCCTGATCCGAGCAAGTTCTTTAGCCAGCTGAGCAGCGAGCATGGCGGCGACGT
TCAGAAATGGCTGTCTAGCCCATTTCCTAGCAGCAGCTTCAGCCCTGGTGGACTGGCCCCTG
AGATTAGCCCTCTGGAAGTGCTGGAACGGGACAAAGTGACCCAGCTGCTCCTGCAGCAGGAT
AAGGTGCCAGAACCTGCCAGCCTGTCCAGCAATCACAGCCTGACCAGCTGCTTTACCAACCA
GGGCTACTTCTTCTTCCATCTGCCTGACGCTCTGGAAATCGAGGCCTGCCAGGTGTACTTCA
CCTACGATCCCTACAGCGAAGAGGACCCCGATGAAGGTGTTGCCGGTGCTCCTACCGGAAGC
TCTCCTCAACCTCTGCAACCACTGAGCGGCGAGGATGACGCCTACTGCACATTCCCCAGCAG
AGATGACCTGCTGCTGTTCAGCCCTTCTCTGCTCGGTGGACCTTCTCCACCTTCTACAGCAC
CTGGCGGATCTGGCGCAGGCGAGGAAAGAATGCCTCCTAGCCTGCAAGAGAGAGTGCCCAGA
GACTGGGATCCTCAGCCTCTCGGACCTCCTACACCAGGCGTGCCAGACCTGGTGGATTTTCA
GCCTCCTCCAGAGCTGGTGCTGAGAGAAGCTGGCGAAGAAGTGCCAGACGCCGGACCTAGAG
AGGGCGTTAGCTTTCCTTGGAGCAGACCTCCTGGACAGGGCGAGTTCAGAGCCCTGAATGCT
AGACTGCCCCTGAACACCGATGCCTACCTGTCTCTGCAAGAGCTGCAGGGACAAGACCCCAC
ACATCTGGTGGAACGGAGCATGCCTAGAATGCCGAGACTGAAGAACCTGGAAGATCTGGTCA
CCGAGTACCACGGCAACTTCAGTGCTTGGAGCGGCGTCAGCAAAGGACTGGCCGAATCTCTG
CAGCCCGACTACAGCGAGAGACTGTGCCTGGTGTCTGAGATCCCTCCTAAAGGCGGAGCCCT
TGGAGAAGGACCTGGCGCCTCTCCATGTAACCAGCACAGCCCTTATTGGGCCCCTCCTTGCT
ACACTCTGAAGCCCGAGACAAGAGTGAAGTTCAGCCGCAGCGCTGATGCCCCTGCCTACAAG
CAGGGACAGAACCAGCTGTACAACGAGCTGAATCTGGGGCGCAGAGAAGAGTACGATGTGCT
GGACAAGCGGAGAGGCAGAGATCCTGAGATGGGCGGCAAGCCCAGACGGAAGAATCCTCAAG
AGGGCCTGTATAATGAGCTGCAGAAAGACAAGATGGCCGAGGCCTACTCCGAGATCGGAATG
AAGGGCGAGCGCAGAAGAGGCAAGGGACACGATGGACTGTATCAGGGCCTGAGCACCGCCAC
CAAGGATACCTATGATGCCCTGCACATGCAGGCCCTGCCTCCAAGA

[0340] An exemplary protein sequence encoding a CSR 22BG protein of the disclosure comprises or consists of the amino acid sequence of (CD2 signal peptide, CD2 extra cellular domain (D111H), CD2 transmembrane domain, IL2RB intracellular domain #1, IL2RG intracellular domain #2):

(SEQ ID NO: 31)
MSFPCKFVASFLLIFNVSSKGAVSKEITNALETWGALGQDINLDTPSFQMSDDIDDTKWEKT
SDKKKIAQFRKEKETFKEKDTYKLFKNGTLKIKHLKTDDQDIYKVSIYHTKGKNVLEKIFDL
KIQERVSKPKISWTCINTTLTCEVMNGTDPELNLYQDGKHLKLSQRVITHKWTTSLSAKFKC
TAGNKVSKESSVEPVSCPEKGLDIYLIIGICGGGSLLMVFVALLVFYITNCRNTGPWLKKVL
KCNTPDPSKFFSQLSSEHGGDVQKWLSSPFPSSSFSPGGLAPEISPLEVLERDKVTQLLLQQ
DKVPEPASLSSNHSLTSCFTNQGYFFFHLPDALEIEACQVYFTYDPYSEEDPDEGVAGAPTG
SSPQPLQPLSGEDDAYCTFPSRDDLLLFSPSLLGGPSPPSTAPGGSGAGEERMPPSLQERVP
RDWDPQPLGPPTPGVPDLVDFQPPPELVLREAGEEVPDAGPREGVSFPWSRPPGQGEFRALN
ARLPLNTDAYLSLQELQGQDPTHLVERTMPRIPTLKNLEDLVTEYHGNFSAWSGVSKGLAES
LQPDYSERLCLVSEIPPKGGALGEGPGASPCNQHSPYWAPPCYTLKPET

[0341] An exemplary nucleotide sequence encoding a CSR 22BG protein of the disclosure comprises or consists of the amino acid sequence of (CD2 signal peptide, CD2 extra cellular domain (D111H), CD2 transmembrane domain, IL2RB intracellular domain #1, IL2RG intracellular domain #2):

(SEQ ID NO: 186)
ATGAGCTTCCCTTGCAAGTTCGTGGCCAGCTTCCTGCTGATCTTCAACGTGTCCTCTAAGGG
CGCCGTGTCCAAAGAGATCACAAACGCCCTGGAAACCTGGGGAGCCCTCGGCCAGGATATTA
ACCTGGACATCCCCAGCTTCCAGATGAGCGACGACATCGATGACATCAAGTGGGAGAAAACC
AGCGACAAGAAGAAGATCGCCCAGTTCCGGAAAGAGAAAGAGACATTCAAAGAGAAGGACAC
CTACAAGCTGTTCAAGAACGGCACCCTGAAGATCAAGCACCTGAAAACCGACGACCAGGACA
TCTATAAGGTGTCCATCTACCACACCAAGGGCAAGAACGTGCTGGAAAAGATCTTCGACCTC
AAGATCCAAGAGCGGGTGTCCAAGCCTAAGATCAGCTGGACCTGCATCAACACCACACTGAC
CTGCGAAGTGATGAACGGCACAGACCCCGAGCTGAACCTGTACCAGGATGGCAAACACCTGA
AGCTGAGCCAGCGCGTGATCACCCACAAGTGGACAACAAGCCTGAGCGCCAAGTTCAAGTGC
ACCGCCGGAAACAAAGTGTCTAAAGAGTCCAGCGTCGAGCCCGTGTCTTGCCCTGAAAAAGG
ACTGGACATCTACCTGATCATCGGCATCTGTGGCGGCGGAAGCCTGCTGATGGTGTTTGTGG
CTCTGCTGGTGTTCTACATCACCAACTGCCGGAACACAGGCCCCTGGCTGAAGAAAGTGCTG
AAGTGCAACACCCCTGATCCGAGCAAGTTCTTTAGCCAGCTGAGCAGCGAGCATGGCGGCGA
CGTTCAGAAATGGCTGTCTAGCCCATTTCCTAGCAGCAGCTTCAGCCCTGGTGGACTGGCCC
CTGAGATTAGCCCTCTGGAAGTGCTGGAACGGGACAAAGTGACCCAGCTGCTCCTGCAGCAG
GATAAGGTGCCAGAACCTGCCAGCCTGTCCAGCAATCACAGCCTGACCAGCTGCTTTACCAA
CCAGGGCTACTTCTTCTTCCATCTGCCTGACGCTCTGGAAATCGAGGCCTGCCAGGTGTACT
TCACCTACGATCCCTACAGCGAAGAGGACCCCGATGAAGGTGTTGCCGGTGCTCCTACCGGA
AGCTCTCCTCAACCTCTGCAACCACTGAGCGGCGAGGATGACGCCTACTGCACATTCCCCAG
CAGAGATGACCTGCTGCTGTTCAGCCCTTCTCTGCTCGGTGGACCTTCTCCACCTTCTACAG
CACCTGGCGGATCTGGCGCAGGCGAGGAAAGAATGCCTCCTAGCCTGCAAGAGAGAGTGCCC
AGAGACTGGGATCCTCAGCCTCTCGGACCTCCTACACCAGGCGTGCCAGACCTGGTGGATTT
TCAGCCTCCTCCAGAGCTGGTGCTGAGAGAAGCTGGCGAAGAAGTGCCAGACGCCGGACCTA
GAGAGGGCGTTAGCTTTCCTTGGAGCAGACCTCCTGGACAGGGCGAGTTCAGAGCCCTGAAT
GCTAGACTGCCCCTGAACACCGATGCCTACCTGTCTCTGCAAGAGCTGCAGGGACAAGACCC
CACACATCTGGTGGAACGGAGCATGCCTAGAATCCCGAGACTGAAGAACCTGGAAGATCTGG
TCACCGAGTACCACGGCAACTTCAGTGCTTGGAGCGGCGTCAGTAAAGGCCTGGCCGAATCT
CTGCAGCCCGACTACTCTGAGAGACTGTGCCTGGTGTCTGAGATCCCTCCTAAAGGCGGAGC
CCTTGGAGAAGGACCTGGCGCCTCTCCATGTAACCAGCACAGCCCTTATTGGGCCCCTCCTT
GCTACACTCTGAAGCCCGAGACA

[0342] An exemplary protein sequence encoding a CSR 22BGz protein of the disclosure comprises or consists of the amino acid sequence of (CD2 signal peptide, CD2 extra cellular domain (D111H), CD2 transmembrane domain, IL2RB intracellular domain #1, IL2RG intracellular domain #2, CD3z intracellular domain #3):

(SEQ ID NO: 32)
MSFPCKFVASFLLIFNVSSKGAVSKEITNALETWGALGQDINLDTPSFQMSDDIDDTKWEKT
SDKKKIAQFRKEKETFKEKDTYKLFKNGTLKIKHLKTDDQDIYKVSIYHTKGKNVLEKIFDL
KIQERVSKPKISWTCINTTLTCEVMNGTDPELNLYQDGKHLKLSQRVITHKWTTSLSAKFKC
TAGNKVSKESSVEPVSCPEKGLDIYLIIGICGGGSLLMVFVALLVFYITNCRNTGPWLKKVL
KCNTPDPSKFFSQLSSEHGGDVQKWLSSPFPSSSFSPGGLAPEISPLEVLERDKVTQLLLQQ
DKVPEPASLSSNHSLTSCFTNQGYFFFHLPDALEIEACQVYFTYDPYSEEDPDEGVAGAPTG
SSPQPLQPLSGEDDAYCTFPSRDDLLLFSPSLLGGPSPPSTAPGGSGAGEERMPPSLQERVP
RDWDPQPLGPPTPGVPDLVDFQPPPELVLREAGEEVPDAGPREGVSFPWSRPPGQGEFRALN
ARLPLNTDAYLSLQELQGQDPTHLVERTMPRIPTLKNLEDLVTEYHGNFSAWSGVSKGLAES
LQPDYSERLCLVSEIPPKGGALGEGPGASPCNQHSPYWAPPCYTLKPETRVKFSRSADAPAY
KQGQNQLYNELNLGRREEYDVLDKRRGRDPEMGGKPRRKNPQEGLYNELQKDKMAEAYSEIG
[sequence omitted]

[0343] An exemplary nucleotide sequence encoding a CSR 22BGz protein of the disclosure comprises or consists of the amino acid sequence of (CD2 signal peptide, CD2 extra cellular domain (D111H), CD2 transmembrane domain, IL2RB intracellular domain #1, IL2RG intracellular domain #2, CD3z intracellular domain #3):

(SEQ ID NO: 187)
ATGAGCTTCCCTTGCAAGTTCGTGGCCAGCTTCCTGCTGATCTTCAACGTGTCCTCTAAGGG
CGCCGTGTCCAAAGAGATCACAAACGCCCTGGAAACCTGGGGAGCCCTCGGCCAGGATATTA
ACCTGGACATCCCCAGCTTCCAGATGAGCGACGACATCGATGACATCAAGTGGGAGAAAACC
AGCGACAAGAAGAAGATCGCCCAGTTCCGGAAAGAGAAAGAGACATTCAAAGAGAAGGACAC
CTACAAGCTGTTCAAGAACGGCACCCTGAAGATCAAGCACCTGAAAACCGACGACCAGGACA
TCTATAAGGTGTCCATCTACCACACCAAGGGCAAGAACGTGCTGGAAAAGATCTTCGACCTC
AAGATCCAAGAGCGGGTGTCCAAGCCTAAGATCAGCTGGACCTGCATCAACACCACACTGAC
CTGCGAAGTGATGAACGGCACAGACCCCGAGCTGAACCTGTACCAGGATGGCAAACACCTGA
AGCTGAGCCAGCGCGTGATCACCCACAAGTGGACAACAAGCCTGAGCGCCAAGTTCAAGTGC
ACCGCCGGAAACAAAGTGTCTAAAGAGTCCAGCGTCGAGCCCGTGTCTTGCCCTGAAAAAGG
ACTGGACATCTACCTGATCATCGGCATCTGTGGCGGCGGAAGCCTGCTGATGGTGTTTGTGG
CTCTGCTGGTGTTCTACATCACCAACTGCCGGAACACAGGCCCCTGGCTGAAGAAAGTGCTG
AAGTGCAACACCCCTGATCCGAGCAAGTTCTTTAGCCAGCTGAGCAGCGAGCATGGCGGCGA
CGTTCAGAAATGGCTGTCTAGCCCATTTCCTAGCAGCAGCTTCAGCCCTGGTGGACTGGCCC
CTGAGATTAGCCCTCTGGAAGTGCTGGAACGGGACAAAGTGACCCAGCTGCTCCTGCAGCAG
GATAAGGTGCCAGAACCTGCCAGCCTGTCCAGCAATCACAGCCTGACCAGCTGCTTTACCAA
CCAGGGCTACTTCTTCTTCCATCTGCCTGACGCTCTGGAAATCGAGGCCTGCCAGGTGTACT
TCACCTACGATCCCTACAGCGAAGAGGACCCCGATGAAGGTGTTGCCGGTGCTCCTACCGGA
AGCTCTCCTCAACCTCTGCAACCACTGAGCGGCGAGGATGACGCCTACTGCACATTCCCCAG
CAGAGATGACCTGCTGCTGTTCAGCCCTTCTCTGCTCGGTGGACCTTCTCCACCTTCTACAG
CACCTGGCGGATCTGGCGCAGGCGAGGAAAGAATGCCTCCTAGCCTGCAAGAGAGAGTGCCC
AGAGACTGGGATCCTCAGCCTCTCGGACCTCCTACACCAGGCGTGCCAGACCTGGTGGATTT
TCAGCCTCCTCCAGAGCTGGTGCTGAGAGAAGCTGGCGAAGAAGTGCCAGACGCCGGACCTA
GAGAGGGCGTTAGCTTTCCTTGGAGCAGACCTCCTGGACAGGGCGAGTTCAGAGCCCTGAAT
GCTAGACTGCCCCTGAACACCGATGCCTACCTGTCTCTGCAAGAGCTGCAGGGACAAGACCC
CACACATCTGGTGGAACGGAGCATGCCTAGAATCCCCACACTGAAGAACCTGGAAGATCTGG
TCACCGAGTACCACGGCAACTTCAGTGCTTGGAGCGGCGTCAGTAAAGGCCTGGCCGAATCT
CTGCAGCCCGACTACTCTGAGAGACTGTGCCTGGTGTCTGAGATCCCTCCTAAAGGCGGAGC
CCTTGGAGAAGGACCTGGCGCCTCTCCATGTAACCAGCACAGCCCTTATTGGGCCCCTCCTT
GCGACACGCGGAAGCCCGAGACAAGAGTGAAGTTCAGCCGCAGCGCTGATGCCCCTGCCTAC
AAGCAGGGACAGAACCAGCTGTACAACGAGCTGAATCTGGGGCGCAGAGAAGAGTACGATGT
GCTGGACAAGCGGAGAGGCAGAGATCCTGAGATGGGCGGCAAGCCCAGACGGAAGAATCCTC
AAGAGGGCCTGTATAATGAGCTGCAGAAAGACAAGATGGCCGAGGCCTACTCCGAGATCGGA
ATGAAGGGCGAGCGCAGAAGAGGCAAGGGACACGATGGACTGTATCAGGGCCTGAGCACCGC
CACCAAGGATACCTATGATGCCCTGCACATGCAGGCCCTGCCTCCAAGA

[0344] An exemplary protein sequence encoding a CSR 2GGB protein of the disclosure comprises or consists of the amino acid sequence of (CD2 signal peptide, CD2 extra cellular domain (D111H), IL2RG transmembrane domain, IL2RG intracellular domain #1, IL2RB intracellular domain #2):

(SEQ ID NO: 33)
MSFPCKFVASFLLIFNVSSKGAVSKEITNALETWGALGQDINLDTPSFQMSDDIDDTKWEKT
SDKKKIAQFRKEKETFKEKDTYKLFKNGTLKIKHLKTDDQDIYKVSIYHTKGKNVLEKIFDL
KIQERVSKPKISWTCINTTLTCEVMNGTDPELNLYQDGKHLKLSQRVITHKWTTSLSAKFKC
TAGNKVSKESSVEPVSCPEKGLDAVVISVGSMGLIISLLCVYFWLERTMPRIPTLKNLEDLV
TEYHGNFSAWSGVSKGLAESLQPDYSERLCLVSEIPPKGGALGEGPGASPCNQHSPYWAPPC
YTLKPETNCRNTGPWLKKVLKCNTPDPSKFFSQLSSEHGGDVQKWLSSPFPSSSFSPGGLAP
EISPLEVLERDKVTQLLLQQDKVPEPASLSSNHSLTSCFTNQGYFFFHLPDALEIEACQVYF
TYDPYSEEDPDEGVAGAPTGSSPQPLQPLSGEDDAYCTFPSRDDLLLFSPSLLGGPSPPSTA
PGGSGAGEERMPPSLQERVPRDWDPQPLGPPTPGVPDLVDFQPPPELVLREAGEEVPDAGPR
EGVSFPWSRPPGQGEFRALNARLPLNTDAYLSLQELQGQDPTHLV

[0345] An exemplary nucleotide sequence encoding a CSR 2GGB protein of the disclosure comprises or consists of the amino acid sequence of (CD2 signal peptide, CD2 extra cellular domain (D111H), IL2RG transmembrane domain, IL2RG intracellular domain #1, IL2RB intracellular domain #2):

(SEQ ID NO: 188)
ATGAGCTTCCCTTGCAAGTTCGTGGCCAGCTTCCTGCTGATCTTCAACGTGTCCTCTAAGGG
CGCCGTGTCCAAAGAGATCACAAACGCCCTGGAAACCTGGGGAGCCCTCGGCCAGGATATTA
ACCTGGACATCCCCAGCTTCCAGATGAGCGACGACATCGATGACATCAAGTGGGAGAAAACC
AGCGACAAGAAGAAGATCGCCCAGTTCCGGAAAGAGAAAGAGACATTCAAAGAGAAGGACAC
CTACAAGCTGTTCAAGAACGGCACCCTGAAGATCAAGCACCTGAAAACCGACGACCAGGACA
TCTATAAGGTGTCCATCTACCACACCAAGGGCAAGAACGTGCTGGAAAAGATCTTCGACCTC
AAGATCCAAGAGCGGGTGTCCAAGCCTAAGATCAGCTGGACCTGCATCAACACCACACTGAC
CTGCGAAGTGATGAACGGCACAGACCCCGAGCTGAACCTGTACCAGGATGGCAAACACCTGA
AGCTGAGCCAGCGCGTGATCACCCACAAGTGGACAACAAGCCTGAGCGCCAAGTTCAAGTGC
ACCGCCGGAAACAAAGTGTCTAAAGAGTCCAGCGTCGAGCCCGTGTCTTGCCCTGAGAAAGG
ACTGGATGCCGTGGTCATCAGCGTGGGCTCTATGGGCCTGATCATCAGCCTGCTGTGCGTGT
ACTTCTGGCTGGAACGGACCATGCCTCGGATCCCCACACTGAAGAACCTGGAAGATCTGGTC
ACCGAGTACCACGGCAACTTCTCTGCTTGGAGCGGCGTCAGTAAAGGCCTGGCCGAATCTCT
GCAGCCCGACTACTCTGAGAGACTGTGCCTGGTGTCTGAGATCCCTCCTAAAGGCGGAGCCC
TTGGAGAAGGACCTGGCGCCTCTCCATGTAACCAGCACAGCCCTTATTGGGCCCCTCCTTGC
TACACTCTGAAGCCCGAGACAAACTGCCGGAACACAGGCCCCTGGCTGAAGAAAGTGCTGAA
GTGCAACACCCCTGATCCGAGCAAGTTCTTTAGCCAGCTGAGCAGCGAGCATGGCGGCGACG
TTCAGAAATGGCTGTCTAGCCCATTTCCTAGCAGCAGCTTCAGCCCTGGTGGACTGGCCCCT
GAGATTAGCCCTCTGGAAGTGCTCGAGCGGGACAAAGTGACACAGCTGCTCCTCCAGCAGGA
CAAGGTGCCAGAACCTGCCAGCCTGTCCAGCAATCACAGCCTGACCAGCTGCTTTACCAACC
AGGGCTACTTCTTCTTCCATCTGCCTGACGCTCTGGAAATCGAGGCCTGCCAGGTGTACTTC
ACCTACGATCCCTACAGCGAAGAGGACCCCGATGAAGGTGTTGCCGGTGCTCCTACCGGAAG
CTCTCCTCAACCTCTCCAACCTCTGAGCGGCGAGGATGACGCCTACTGCACATTCCCCAGCA
GAGATGACCTGCTGCTGTTCAGCCCTAGCCTGCTCGGAGGACCTTCTCCACCATCTACAGCT
CCAGGTGGAAGCGGAGCCGGCGAGGAAAGAATGCCTCCAAGCCTGCAAGAGAGAGTGCCCAG
AGACTGGGATCCTCAGCCTCTCGGACCTCCTACACCAGGCGTGCCAGACCTGGTGGATTTTC
AGCCTCCTCCAGAGCTGGTGCTGAGAGAAGCTGGCGAAGAAGTGCCAGACGCCGGACCTAGA
GAGGGCGTTAGCTTTCCTTGGAGCAGACCTCCTGGACAGGGCGAGTTCAGAGCCCTGAATGC
TAGACTGCCCCTGAACACCGATGCCTACCTGTCTCTGCAAGAGCTGCAGGGACAAGACCCCA
CACACCTGGTG

[0346] An exemplary protein sequence encoding a CSR 2GGBz protein of the disclosure comprises or consists of the amino acid sequence of (CD2 signal peptide, CD2 extra cellular domain (D111H), IL2RG transmembrane domain, IL2RG intracellular domain #1, IL2RB intracellular domain #2, CD3z intracellular domain #3):

(SEQ ID NO: 34)
MSFPCKFVASFLLIFNVSSKGAVSKEITNALETWGALGQDINLDTPSFQMSDDIDDTKWEKT
SDKKKIAQFRKEKETFKEKDTYKLFKNGTLKIKHLKTDDQDIYKVSIYHTKGKNVLEKIFDL
KIQERVSKPKISWTCINTTLTCEVMNGTDPELNLYQDGKHLKLSQRVITHKWTTSLSAKFKC
TAGNKVSKESSVEPVSCPEKGLDAVVISVGSMGLIISLLCVYFWLERTMPRIPTLKNLEDLV
TEYHGNFSAWSGVSKGLAESLQPDYSERLCLVSEIPPKGGALGEGPGASPCNQHSPYWAPPC
YTLKPETNCRNTGPWLKKVLKCNTPDPSKFFSQLSSEHGGDVQKWLSSPFPSSSFSPGGLAP
EISPLEVLERDKVTQLLLQQDKVPEPASLSSNHSLTSCFTNQGYFFFHLPDALEIEACQVYF
TYDPYSEEDPDEGVAGAPTGSSPQPLQPLSGEDDAYCTFPSRDDLLLFSPSLLGGPSPPSTA
PGGSGAGEERMPPSLQERVPRDWDPQPLGPPTPGVPDLVDFQPPPELVLREAGEEVPDAGPR
EGVSFPWSRPPGQGEFRALNARLPLNTDAYLSLQELQGQDPTHLVRVKFSRSADAPAYKQGQ
NQLYNELNLGRREEYDVLDKRRGRDPEMGGKPRRKNPQEGLYNELQKDKMAEAYSEIGMKGE
RRRGKGHDGLYQGLSTATKDTYDALHMQALPPR

[0347] An exemplary nucleotide sequence encoding a CSR 2GGBz protein of the disclosure comprises or consists of the amino acid sequence of (CD2 signal peptide, CD2 extra cellular domain (D111H), IL2RG transmembrane domain, IL2RG intracellular domain #1, IL2RB intracellular domain #2, CD3z intracellular domain #3):

(SEQ ID NO: 189)
ATGAGCTTCCCTTGCAAGTTCGTGGCCAGCTTCCTGCTGATCTTCAACGTGTCCTCTAAGGG
CGCCGTGTCCAAAGAGATCACAAACGCCCTGGAAACCTGGGGAGCCCTCGGCCAGGATATTA
ACCTGGACATCCCCAGCTTCCAGATGAGCGACGACATCGATGACATCAAGTGGGAGAAAACC
AGCGACAAGAAGAAGATCGCCCAGTTCCGGAAAGAGAAAGAGACATTCAAAGAGAAGGACAC
CTACAAGCTGTTCAAGAACGGCACCCTGAAGATCAAGCACCTGAAAACCGACGACCAGGACA
TCTATAAGGTGTCCATCTACCACACCAAGGGCAAGAACGTGCTGGAAAAGATCTTCGACCTC
AAGATCCAAGAGCGGGTGTCCAAGCCTAAGATCAGCTGGACCTGCATCAACACCACACTGAC
CTGCGAAGTGATGAACGGCACAGACCCCGAGCTGAACCTGTACCAGGATGGCAAACACCTGA
AGCTGAGCCAGCGCGTGATCACCCACAAGTGGACAACAAGCCTGAGCGCCAAGTTCAAGTGC
ACCGCCGGAAACAAAGTGTCTAAAGAGTCCAGCGTCGAGCCCGTGTCTTGCCCTGAGAAAGG
ACTGGATGCCGTGGTCATCAGCGTGGGCTCTATGGGCCTGATCATCAGCCTGCTGTGCGTGT
ACTTCTGGCTGGAACGGACCATGCCTCGGATCCCCACACTGAAGAACCTGGAAGATCTGGTC
ACCGAGTACCACGGCAACTTCTCTGCTTGGAGCGGCGTCAGTAAAGGCCTGGCCGAATCTCT
GCAGCCCGACTACTCTGAGAGACTGTGCCTGGTGTCTGAGATCCCTCCTAAAGGCGGAGCCC
TTGGAGAAGGACCTGGCGCCTCTCCATGTAACCAGCACAGCCCTTATTGGGCCCCTCCTTGC
TACACTCTGAAGCCCGAGACAAACTGCCGGAACACAGGCCCCTGGCTGAAGAAAGTGCTGAA
GTGCAACACCCCTGATCCGAGCAAGTTCTTTAGCCAGCTGAGCAGCGAGCATGGCGGCGACG
TTCAGAAATGGCTGTCTAGCCCATTTCCTAGCAGCAGCTTCAGCCCTGGTGGACTGGCCCCT
GAGATTAGCCCTCTGGAAGTGCTCGAGCGGGACAAAGTGACACAGCTGCTCCTCCAGCAGGA
CAAGGTGCCAGAACCTGCCAGCCTGTCCAGCAATCACAGCCTGACCAGCTGCTTTACCAACC
AGGGCTACTTCTTCTTCCATCTGCCTGACGCTCTGGAAATCGAGGCCTGCCAGGTGTACTTC
ACCTACGATCCCTACAGCGAAGAGGACCCCGATGAAGGTGTTGCCGGTGCTCCTACCGGAAG
CTCTCCTCAACCTCTCCAACCTCTGAGCGGCGAGGATGACGCCTACTGCACATTCCCCAGCA
GAGATGACCTGCTGCTGTTCAGCCCTAGCCTGCTCGGAGGACCTTCTCCACCATCTACAGCT
CCAGGTGGAAGCGGAGCCGGCGAGGAAAGAATGCCTCCAAGCCTGCAAGAGAGAGTGCCCAG
AGACTGGGATCCTCAGCCTCTCGGACCTCCTACACCAGGCGTGCCAGACCTGGTGGATTTTC
AGCCTCCTCCAGAGCTGGTGCTGAGAGAAGCTGGCGAAGAAGTGCCAGACGCCGGACCTAGA
GAGGGCGTTAGCTTTCCTTGGAGCAGACCTCCTGGACAGGGCGAGTTCAGAGCCCTGAATGC
TAGACTGCCCCTGAACACCGATGCCTACCTGTCTCTGCAAGAGCTGCAGGGACAAGACCCCA
CACACCGCGGCAGAGTGAAGTTCAGCAGATCCGCCGACGCTCCCGCCTATAAGCAGGGACAG
AACCAGCTGTACAACGAGCTGAATCTGGGGCGCAGAGAAGAGTACGATGTGCTGGACAAGCG
GAGAGGCAGAGATCCTGAGATGGGCGGCAAGCCCAGACGGAAGAATCCTCAAGAGGGCCTGT
ATAATGAGCTGCAGAAAGACAAGATGGCCGAGGCCTACTCCGAGATCGGAATGAAGGGCGAG
CGCAGAAGAGGCAAGGGACACGATGGACTGTATCAGGGCCTGAGCACCGCCACCAAGGATAC
CTATGATGCCCTGCACATGCAGGCCCTGCCACCTAGA

[0348] An exemplary protein sequence encoding a CSR 22 GB protein of the disclosure comprises or consists of the amino acid sequence of (CD2 signal peptide, CD2 extra cellular domain (D111H), CD2 transmembrane domain, IL2RG intracellular domain #1, IL2RB intracellular domain #2):

(SEQ ID NO: 35)
MSFPCKFVASFLLIFNVSSKGAVSKEITNALETWGALGQDINLDTPSFQMSDDIDDTKWEKT
SDKKKIAQFRKEKETFKEKDTYKLFKNGTLKIKHLKTDDQDIYKVSIYHTKGKNVLEKIFDL
KIQERVSKPKISWTCINTTLTCEVMNGTDPELNLYQDGKHLKLSQRVITHKWTTSLSAKFKC
TAGNKVSKESSVEPVSCPEKGLDIYEIIGICGGGSLLMVFVALLVFYITERTMPRIPTLKNL
EDLVTEYHGNFSAWSGVSKGLAESLQPDYSERLCLVSEIPPKGGALGEGPGASPCNQHSPYW
APPCYTLKPETNCRNTGPWLKKVLKCNTPDPSKFFSQLSSEHGGDVQKWLSSPFPSSSFSPG
GLAPEISPLEVLERDKVTQLLLQQDKVPEPASLSSNHSLTSCFTNQGYFFFHLPDALEIEAC
QVYFTYDPYSEEDPDEGVAGAPTGSSPQPLQPLSGEDDAYCTFPSRDDLLLFSPSLLGGPSP
PSTAPGGSGAGEERMPPSLQERVPRDWDPQPLGPPTPGVPDLVDFQPPPELVLREAGEEVPD
AGPREGVSFPWSRPPGQGEFRALNARLPLNTDAYLSLQELQGQDPTHLV

[0349] An exemplary nucleotide sequence encoding a CSR 22 GB protein of the disclosure comprises or consists of the amino acid sequence of (CD2 signal peptide, CD2 extra cellular domain (D111H), CD2 transmembrane domain, IL2RG intracellular domain #1, IL2RB intracellular domain #2):

(SEQ ID NO: 190)
ATGAGCTTCCCTTGCAAGTTCGTGGCCAGCTTCCTGCTGATCTTCAACGTGTCCTCTAAGGG
CGCCGTGTCCAAAGAGATCACAAACGCCCTGGAAACCTGGGGAGCCCTCGGCCAGGATATTA
ACCTGGACATCCCCAGCTTCCAGATGAGCGACGACATCGATGACATCAAGTGGGAGAAAACC
AGCGACAAGAAGAAGATCGCCCAGTTCCGGAAAGAGAAAGAGACATTCAAAGAGAAGGACAC
CTACAAGCTGTTCAAGAACGGCACCCTGAAGATCAAGCACCTGAAAACCGACGACCAGGACA
TCTATAAGGTGTCCATCTACCACACCAAGGGCAAGAACGTGCTGGAAAAGATCTTCGACCTC
AAGATCCAAGAGCGGGTGTCCAAGCCTAAGATCAGCTGGACCTGCATCAACACCACACTGAC
CTGCGAAGTGATGAACGGCACAGACCCCGAGCTGAACCTGTACCAGGATGGCAAACACCTGA
AGCTGAGCCAGCGCGTGATCACCCACAAGTGGACAACAAGCCTGAGCGCCAAGTTCAAGTGC
ACCGCCGGAAACAAAGTGTCTAAAGAGTCCAGCGTCGAGCCCGTGTCTTGCCCTGAAAAAGG
ACTGGACATCTACCTGATCATCGGCATCTGTGGCGGCGGAAGCCTGCTGATGGTGTTTGTGG
CTCTGCTGGTGTTCTACATCACCGAGCGGACCATGCCTCGGATCCCCACACTGAAGAACCTG
GAAGATCTGGTCACCGAGTACCACGGCAACTTCTCTGCTTGGAGCGGCGTCAGTAAAGGCCT
GGCCGAATCTCTGCAGCCCGACTACTCTGAGAGACTGTGCCTGGTGTCTGAGATCCCTCCTA
AAGGCGGAGCCCTTGGAGAAGGACCTGGCGCCTCTCCATGTAACCAGCACAGCCCTTATTGG
GCCCCTCCTTGCTACACTCTGAAGCCCGAGACAAACTGCCGGAACACAGGCCCCTGGCTGAA
GAAAGTGCTGAAGTGCAACACCCCTGATCCGAGCAAGTTCTTTAGCCAGCTGAGCAGCGAGC
ATGGCGGCGACGTTCAGAAATGGCTGTCTAGCCCATTTCCTAGCAGCAGCTTCAGCCCTGGT
GGACTGGCCCCTGAGATTAGCCCTCTGGAAGTGCTGGAACGGGACAAAGTGACCCAGCTGCT
CCTGCAGCAGGATAAGGTGCCAGAACCTGCCAGCCTGTCCAGCAATCACAGCCTGACCAGCT
GCTTTACCAACCAGGGCTACTTCTTCTTCCATCTGCCTGACGCTCTGGAAATCGAGGCCTGC
CAGGTGTACTTCACCTACGATCCCTACAGCGAAGAGGACCCCGATGAAGGTGTTGCCGGTGC
TCCTACCGGAAGCTCTCCTCAACCTCTCCAACCTCTGAGCGGCGAGGATGACGCCTACTGCA
CATTCCCCAGCAGAGATGACCTGCTGCTGTTCAGCCCTAGCCTGCTCGGAGGACCTTCTCCA
CCATCTACAGCTCCAGGTGGAAGCGGAGCCGGCGAGGAAAGAATGCCTCCAAGCCTGCAAGA
GAGAGTGCCCAGAGACTGGGATCCTCAGCCTCTCGGACCTCCTACACCAGGCGTGCCAGACC
TGGTGGATTTTCAGCCTCCTCCAGAGCTGGTGCTGAGAGAAGCTGGCGAAGAAGTGCCAGAC
GCCGGACCTAGAGAGGGCGTTAGCTTTCCTTGGAGCAGACCTCCTGGACAGGGCGAGTTCAG
AGCCCTGAATGCTAGACTGCCCCTGAACACCGATGCCTACCTGTCTCTGCAAGAGCTGCAGG
GACAAGACCCCACACACCTGGTG

[0350] An exemplary protein sequence encoding a CSR 22GBz protein of the disclosure comprises or consists of the amino acid sequence of (CD2 signal peptide, CD2 extra cellular domain (D111H), CD2 transmembrane domain, IL2RG intracellular domain #1, IL2RB intracellular domain #2, CD3z intracellular domain #3):

(SEQ ID NO: 36)
MSFPCKFVASFLLIFNVSSKGAVSKEITNALETWGALGQDINLDTPSFQMSDDIDDTKWEKT
SDKKKIAQFRKEKETFKEKDTYKLFKNGTLKIKHLKTDDQDIYKVSIYHTKGKNVLEKIFDL
KIQERVSKPKISWTCINTTLTCEVMNGTDPELNLYQDGKHLKLSQRVITHKWTTSLSAKFKC
TAGNKVSKESSVEPVSCPEKGLDIYEIIGICGGGSLLMVFVALLVFYITERTMPRIPTLKNL
EDLVTEYHGNFSAWSGVSKGLAESLQPDYSERLCLVSEIPPKGGALGEGPGASPCNQHSPYW
APPCYTLKPETNCRNTGPWLKKVLKCNTPDPSKFFSQLSSEHGGDVQKWLSSPFPSSSFSPG
GLAPEISPLEVLERDKVTQLLLQQDKVPEPASLSSNHSLTSCFTNQGYFFFHLPDALEIEAC
QVYFTYDPYSEEDPDEGVAGAPTGSSPQPLQPLSGEDDAYCTFPSRDDLLLFSPSLLGGPSP
PSTAPGGSGAGEERMPPSLQERVPRDWDPQPLGPPTPGVPDLVDFQPPPELVLREAGEEVPD
AGPREGVSFPWSRPPGQGEFRALNARLPLNTDAYLSLQELQGQDPTHLVRVKFSRSADAPAY
KQGQNQLYNELNLGRREEYDVLDKRRGRDPEMGGKPRRKNPQEGLYNELQKDKMAEAYSEIG
[sequence omitted]

[0351] An exemplary nucleotide sequence encoding a CSR 22GBz protein of the disclosure comprises or consists of the amino acid sequence of (CD2 signal peptide, CD2 extra cellular domain (D111H), CD2 transmembrane domain, IL2RG intracellular domain #1, IL2RB intracellular domain #2, CD3z intracellular domain #3):

(SEQ ID NO: 191)
ATGAGCTTCCCTTGCAAGTTCGTGGCCAGCTTCCTGCTGATCTTCAACGTGTCCTCTAAGGG
CGCCGTGTCCAAAGAGATCACAAACGCCCTGGAAACCTGGGGAGCCCTCGGCCAGGATATTA
ACCTGGACATCCCCAGCTTCCAGATGAGCGACGACATCGATGACATCAAGTGGGAGAAAACC
AGCGACAAGAAGAAGATCGCCCAGTTCCGGAAAGAGAAAGAGACATTCAAAGAGAAGGACAC
CTACAAGCTGTTCAAGAACGGCACCCTGAAGATCAAGCACCTGAAAACCGACGACCAGGACA
TCTATAAGGTGTCCATCTACCACACCAAGGGCAAGAACGTGCTGGAAAAGATCTTCGACCTC
AAGATCCAAGAGCGGGTGTCCAAGCCTAAGATCAGCTGGACCTGCATCAACACCACACTGAC
CTGCGAAGTGATGAACGGCACAGACCCCGAGCTGAACCTGTACCAGGATGGCAAACACCTGA
AGCTGAGCCAGCGCGTGATCACCCACAAGTGGACAACAAGCCTGAGCGCCAAGTTCAAGTGC
ACCGCCGGAAACAAAGTGTCTAAAGAGTCCAGCGTCGAGCCCGTGTCTTGCCCTGAAAAAGG
ACTGGACATCTACCTGATCATCGGCATCTGTGGCGGCGGAAGCCTGCTGATGGTGTTTGTGG
CTCTGCTGGTGTTCTACATCACCGAGCGGACCATGCCTCGGATCCCCACACTGAAGAACCTG
GAAGATCTGGTCACCGAGTACCACGGCAACTTCTCTGCTTGGAGCGGCGTCAGTAAAGGCCT
GGCCGAATCTCTGCAGCCCGACTACTCTGAGAGACTGTGCCTGGTGTCTGAGATCCCTCCTA
AAGGCGGAGCCCTTGGAGAAGGACCTGGCGCCTCTCCATGTAACCAGCACAGCCCTTATTGG
GCCCCTCCTTGCTACACTCTGAAGCCCGAGACAAACTGCCGGAACACAGGCCCCTGGCTGAA
GAAAGTGCTGAAGTGCAACACCCCTGATCCGAGCAAGTTCTTTAGCCAGCTGAGCAGCGAGC
ATGGCGGCGACGTTCAGAAATGGCTGTCTAGCCCATTTCCTAGCAGCAGCTTCAGCCCTGGT
GGACTGGCCCCTGAGATTAGCCCTCTGGAAGTGCTGGAACGGGACAAAGTGACCCAGCTGCT
CCTGCAGCAGGATAAGGTGCCAGAACCTGCCAGCCTGTCCAGCAATCACAGCCTGACCAGCT
GCTTTACCAACCAGGGCTACTTCTTCTTCCATCTGCCTGACGCTCTGGAAATCGAGGCCTGC
CAGGTGTACTTCACCTACGATCCCTACAGCGAAGAGGACCCCGATGAAGGTGTTGCCGGTGC
TCCTACCGGAAGCTCTCCTCAACCTCTCCAACCTCTGAGCGGCGAGGATGACGCCTACTGCA
CATTCCCCAGCAGAGATGACCTGCTGCTGTTCAGCCCTAGCCTGCTCGGAGGACCTTCTCCA
CCATCTACAGCTCCAGGTGGAAGCGGAGCCGGCGAGGAAAGAATGCCTCCAAGCCTGCAAGA
GAGAGTGCCCAGAGACTGGGATCCTCAGCCTCTCGGACCTCCTACACCAGGCGTGCCAGACC
TGGTGGATTTTCAGCCTCCTCCAGAGCTGGTGCTGAGAGAAGCTGGCGAAGAAGTGCCAGAC
GCCGGACCTAGAGAGGGCGTTAGCTTTCCTTGGAGCAGACCTCCTGGACAGGGCGAGTTCAG
AGCCCTGAATGCTAGACTGCCCCTGAACACCGATGCCTACCTGTCTCTGCAAGAGCTGCAGG
GACAAGACCCCACACACCTCGTCAGAGTGAAGTTCAGCAGATCCGCCGACGCTCCCGCCTAT
AAGCAGGGACAGAACCAGCTGTACAACGAGCTGAATCTGGGGCGCAGAGAAGAGTACGATGT
GCTGGACAAGCGGAGAGGCAGAGATCCTGAGATGGGCGGCAAGCCCAGACGGAAGAATCCTC
AAGAGGGCCTGTATAATGAGCTGCAGAAAGACAAGATGGCCGAGGCCTACTCCGAGATCGGA
ATGAAGGGCGAGCGCAGAAGAGGCAAGGGACACGATGGACTGTATCAGGGCCTGAGCACCGC
CACCAAGGATACCTATGATGCCCTGCACATGCAGGCCCTGCCACCTAGA

[0352] An exemplary protein sequence encoding a CSR 8BBB protein of the disclosure comprises or consists of the amino acid sequence of (CD8 signal peptide, IL2RB extra cellular domain, IL2RB transmembrane domain, IL2RB intracellular domain):

(SEQ ID NO: 39)
MALPVTALLLPLALLLHAARPAVNGTSQFTCFYNSRANISCVWSQDGALQDTSCQVHAWPDR
RRWNQTCELLPVSQASWACNLILGAPDSQKLTTVDIVTLRVLCREGVRWRVMAIQDFKPFEN
LRLMAPISLQVVHVETHRCNISWEISQASHYFERHLEFEARTLSPGHTWEEAPLLTLKQKQE
WICLETLTPDTQYEFQVRVKPLQGEFTTWSPWSQPLAFRTKPAALGKDTIPWEGHLLVGLSG
AFGFIILVYLLINCRNTGPWLKKVLKCNTPDPSKFFSQLSSEHGGDVQKWLSSPFPSSSFSP
GGLAPEISPLEVLERDKVTQLLLQQDKVPEPASLSSNHSLTSCFTNQGYFFFHLPDALEIEA
CQVYFTYDPYSEEDPDEGVAGAPTGSSPQPLQPLSGEDDAYCTFPSRDDLLLFSPSLLGGPS
PPSTAPGGSGAGEERMPPSLQERVPRDWDPQPLGPPTPGVPDLVDFQPPPELVLREAGEEVP
DAGPREGVSFPWSRPPGQGEFRALNARLPLNTDAYLSLQELQGQDPTHLV

[0353] An exemplary nucleotide sequence encoding a CSR 8BBB protein of the disclosure comprises or consists of the amino acid sequence of (CD8 signal peptide, IL2RB extra cellular domain, IL2RB transmembrane domain, IL2RB intracellular domain):

(SEQ ID NO: 192)
ATGGCTCTGCCTGTGACAGCTCTGCTGCTGCCTCTGGCTCTGCTTCTGCATGCTGCTAGACC
TGCCGTGAATGGCACCAGCCAGTTCACCTGTTTCTACAACAGCCGGGCCAACATCAGCTGCG
TGTGGTCACAAGATGGCGCCCTGCAGGATACCAGCTGTCAGGTTCACGCCTGGCCTGATCGG
AGAAGATGGAACCAGACATGCGAGCTGCTGCCCGTGTCTCAGGCTAGCTGGGCCTGTAATCT
GATCCTGGGAGCCCCTGACAGCCAGAAACTGACCACAGTGGACATCGTGACCCTGCGGGTGC
TGTGTAGAGAAGGCGTTCGTTGGAGAGTGATGGCCATTCAGGACTTCAAGCCCTTCGAGAAC
CTGCGGCTGATGGCCCCAATTAGCCTGCAGGTTGTGCACGTGGAAACCCACCGGTGCAATAT
CAGCTGGGAGATCAGCCAGGCCAGCCACTACTTCGAGCGGCACCTGGAATTCGAGGCCAGAA
CACTGAGCCCTGGCCACACCTGGGAAGAAGCTCCTCTGCTGACCCTGAAGCAGAAACAAGAG
TGGATCTGCCTGGAAACCCTGACACCTGACACACAGTACGAGTTCCAAGTGCGCGTGAAGCC
TCTCCAGGGCGAGTTTACAACATGGTCCCCTTGGAGTCAGCCCCTGGCCTTTAGAACAAAGC
CTGCCGCTCTGGGCAAAGACACAATCCCTTGGCTGGGCCATCTGCTCGTTGGACTGTCTGGC
GCCTTCGGCTTCATCATCCTGGTGTACCTGCTGATCAACTGCCGGAACACAGGCCCCTGGCT
GAAGAAAGTGCTGAAGTGCAACACCCCTGATCCGAGCAAGTTCTTTAGCCAGCTGAGCAGCG
AGCATGGCGGCGACGTTCAGAAATGGCTGTCTAGCCCATTTCCTAGCAGCAGCTTCAGCCCT
GGTGGACTGGCCCCTGAGATTAGCCCTCTGGAAGTGCTGGAACGGGACAAAGTGACCCAGCT
GCTCCTGCAGCAGGATAAGGTGCCAGAACCTGCCAGCCTGTCCAGCAATCACAGCCTGACCA
GCTGCTTTACCAACCAGGGCTACTTCTTCTTCCATCTGCCTGACGCACTGGAAATTGAGGCC
TGCCAGGTGTACTTCACCTACGATCCCTACAGCGAAGAGGACCCCGATGAAGGTGTTGCCGG
TGCTCCTACCGGAAGCTCTCCTCAACCTCTGCAACCACTGAGCGGCGAGGATGACGCCTACT
GCACATTCCCCAGCAGAGATGACCTGCTGCTGTTCAGCCCTTCTCTGCTCGGCGGACCTTCT
CCACCATCTACAGCTCCAGGTGGAAGCGGAGCCGGCGAGGAAAGAATGCCTCCAAGCCTGCA
AGAGCGGGTGCCCAGAGATTGGGATCCTCAACCACTGGGCCCTCCAACACCTGGCGTGCCAG
ATCTCGTGGATTTCCAGCCTCCTCCAGAGCTGGTGCTGAGAGAAGCTGGCGAAGAAGTGCCA
GACGCTGGCCCTAGAGAGGGCGTTAGCTTTCCTTGGAGCAGACCTCCTGGACAGGGCGAATT
CAGAGCCCTGAATGCCAGACTGCCCCTGAACACCGATGCCTACCTGTCTCTGCAAGAACTGC
AGGGACAAGACCCCACACACCTGGTG

[0354] An exemplary protein sequence encoding a CSR 8BBBz protein of the disclosure comprises or consists of the amino acid sequence of (CD8 signal peptide, IL2RB extra cellular domain, IL2RB transmembrane domain, IL2RB intracellular domain #1, CD3z intracellular domain #2):

(SEQ ID NO: 40)
MALPVTALLLPLALLLHAARPAVNGTSQFTCFYNSRANISCVWSQDGALQDTSCQVHA
WPDRRRWNQTCELLPVSQASWACNLILGAPDSQKLTTVDIVTLRVLCREGVRWRVMAIQD
FKPFENLRLMAPISLQVVHVETHRCNISWEISQASHYFERHLEFEARTLSPGHTWEEAPLL
TLKQKQEWICLETLTPDTQYEFQVRVKPLQGEFTTWSPWSQPLAFRTKPAALGKDTIPWL
GHLLVGLSGAFGFIILVYLLINCRNTGPWLKKVLKCNTPDPSKFFSQLSSEHGGDV
QKWLSSPFPSSSFSPGGLAPEISPLEVLERDKVTQLLLQQDKVPEPASLSSNHSLT
SCFTNQGYFFFHLPDALEIEACQVYFTYDPYSEEDPDEGVAGAPTGSSPQPLQPL
SGEDDAYCTFPSRDDLLLFSPSLLGGPSPPSTAPGGSGAGEERMPPSLQERVPRD
WDPQPLGPPTPGVPDLVDFQPPPELVLREAGEEVPDAGPREGVSFPWSRPPGQG
EFRALNARLPLNTDAYLSLQELQGQDPTHLVRVKFSRSADAPAYKQGQNQLYNEL
NLGRREEYDVLDKRRGRDPEMGGKPRRKNPQEGLYNELQKDKMAEAYSEIGMKGE
RRRGKGHDGLYQGLSTATKDTYDALHMQALPPR

[0355] An exemplary nucleotide sequence encoding a CSR 8BBBz protein of the disclosure comprises or consists of the amino acid sequence of (CD8 signal peptide, IL2RB extra cellular domain, IL2RB transmembrane domain, IL2RB intracellular domain #1, CD3z intracellular domain #2):

(SEQ ID NO: 193)
ATGGCTCTGCCTGTGACAGCTCTGCTGCTGCCTCTGGCTCTGCTTCTGCATGCTGCTAGACC
TGCCGTGAATGGCACCAGCCAGTTCACCTGTTTCTACAACAGCCGGGCCAACATCAGCTGCG
TGTGGTCACAAGATGGCGCCCTGCAGGATACCAGCTGTCAGGTTCACGCCTGGCCTGATCGG
AGAAGATGGAACCAGACATGCGAGCTGCTGCCCGTGTCTCAGGCTAGCTGGGCCTGTAATCT
GATCCTGGGAGCCCCTGACAGCCAGAAACTGACCACAGTGGACATCGTGACCCTGCGGGTGC
TGTGTAGAGAAGGCGTTCGTTGGAGAGTGATGGCCATTCAGGACTTCAAGCCCTTCGAGAAC
CTGCGGCTGATGGCCCCAATTAGCCTGCAGGTTGTGCACGTGGAAACCCACCGGTGCAATAT
CAGCTGGGAGATCAGCCAGGCCAGCCACTACTTCGAGCGGCACCTGGAATTCGAGGCCAGAA
CACTGAGCCCTGGCCACACCTGGGAAGAAGCTCCTCTGCTGACCCTGAAGCAGAAACAAGAG
TGGATCTGCCTGGAAACCCTGACACCTGACACACAGTACGAGTTCCAAGTGCGCGTGAAGCC
TCTCCAGGGCGAGTTTACAACATGGTCCCCTTGGAGTCAGCCCCTGGCCTTTAGAACAAAGC
CTGCCGCTCTGGGCAAAGACACAATCCCTTGGCTGGGCCATCTGCTCGTTGGACTGTCTGGC
GCCTTCGGCTTCATCATCCTGGTGTACCTGCTGATCAACTGCCGGAACACAGGCCCCTGGCT
GAAGAAAGTGCTGAAGTGCAACACCCCTGATCCGAGCAAGTTCTTTAGCCAGCTGAGCAGCG
AGCATGGCGGCGACGTTCAGAAATGGCTGTCTAGCCCATTTCCTAGCAGCAGCTTCAGCCCT
GGTGGACTGGCCCCTGAGATTAGCCCTCTGGAAGTGCTGGAACGGGACAAAGTGACCCAGCT
GCTCCTGCAGCAGGATAAGGTGCCAGAACCTGCCAGCCTGTCCAGCAATCACAGCCTGACCA
GCTGCTTTACCAACCAGGGCTACTTCTTCTTCCATCTGCCTGACGCACTGGAAATTGAGGCC
TGCCAGGTGTACTTCACCTACGATCCCTACAGCGAAGAGGACCCCGATGAAGGTGTTGCCGG
TGCTCCTACCGGAAGCTCTCCTCAACCTCTGCAACCACTGAGCGGCGAGGATGACGCCTACT
GCACATTCCCCAGCAGAGATGACCTGCTGCTGTTCAGCCCTTCTCTGCTCGGCGGACCTTCT
CCACCATCTACAGCTCCAGGTGGAAGCGGAGCCGGCGAGGAAAGAATGCCTCCAAGCCTGCA
AGAGCGGGTGCCCAGAGATTGGGATCCTCAACCACTGGGCCCTCCAACACCTGGCGTGCCAG
ATCTCGTGGATTTCCAGCCTCCTCCAGAGCTGGTGCTGAGAGAAGCTGGCGAAGAAGTGCCA
GACGCTGGCCCTAGAGAGGGCGTTAGCTTTCCTTGGAGCAGACCTCCTGGACAGGGCGAATT
CAGAGCCCTGAATGCCAGACTGCCCCTGAACACCGATGCCTACCTGTCTCTGCAAGAACTGC
AGGGACAAGACCCCACACACCTCGTGCGAGTGAAGTTCAGCAGAAGCGCTGACGCCCCTGCC
TACAAGCAGGGACAGAACCAGCTGTACAACGAGCTGAACCTGGGGAGAAGAGAAGAGTACGA
CGTGCTGGACAAGCGGAGAGGCAGAGATCCTGAGATGGGCGGCAAGCCCAGACGGAAGAATC
CTCAAGAGGGCCTGTATAATGAGCTGCAGAAAGATAAGATGGCCGAGGCCTACTCCGAGATC
GGCATGAAGGGCGAGCGCAGAAGAGGCAAGGGACACGATGGACTGTACCAGGGCCTGAGCAC
CGCCACCAAGGATACCTATGATGCCCTGCACATGCAGGCCCTGCCACCTAGA

[0356] An exemplary protein sequence encoding a CSR 82BB protein of the disclosure comprises or consists of the amino acid sequence of (CD8 signal peptide, CD2 extra cellular domain (D111H), IL2RB transmembrane domain, IL2RB intracellular domain):

(SEQ ID NO: 41)
MALPVTALLLPLALLLHAARPKEITNALETWGALGQDINLDIPSFQMSDDIDDIKWEKTSDK
KKIAQFRKEKETFKEKDTYKLFKNGTLKIKHLKTDDQDIYKVSIYHTKGKNVLEKIFDLKIQ
ERVSKPKISWTCINTTLTCEVMNGTDPELNLYQDGKHLKLSQRVITHKWTTSLSAKFKCTAG
NKVSKESSVEPVSCPEKGLDIPWLGHLLVGLSGAFGFIILVYLLINCRNTGPWLKKVLKCNT
PDPSKFFSQLSSEHGGDVQKWLSSPFPSSSFSPGGLAPEISPLEVLERDKVTQLLLQQDKVP
EPASLSSNHSLTSCFTNQGYFFFHLPDALEIEACQVYFTYDPYSEEDPDEGVAGAPTGSSPQ
PLQPLSGEDDAYCTFPSRDDLLLFSPSLLGGPSPPSTAPGGSGAGEERMPPSLQERVPRDWD
PQPLGPPTPGVPDLVDFQPPPELVLREAGEEVPDAGPREGVSFPWSRPPGQGEFRALNARLP
LNTDAYLSLQELQGQDPTHLV

[0357] An exemplary nucleotide sequence encoding a CSR 82BB protein of the disclosure comprises or consists of the amino acid sequence of (CD8 signal peptide, CD2 extra cellular domain (D111H), IL2RB transmembrane domain, IL2RB intracellular domain):

(SEQ ID NO: 194)
ATGGCTCTGCCTGTGACAGCTCTGCTGCTGCCTCTGGCTCTGCTTCTGCATGCCGCCAGACC
TAAAGAGATCACAAACGCCCTGGAAACCTGGGGAGCCCTCGGCCAGGATATTAACCTGGACA
TCCCCAGCTTCCAGATGAGCGACGACATCGATGACATCAAGTGGGAGAAAACCAGCGACAAG
AAGAAGATCGCCCAGTTCCGGAAAGAGAAAGAGACATTCAAAGAGAAGGACACCTACAAGCT
GTTCAAGAACGGCACCCTGAAGATCAAGCACCTGAAAACCGACGACCAGGACATCTATAAGG
TGTCCATCTACCACACCAAGGGCAAGAACGTGCTGGAAAAGATCTTCGACCTCAAGATCCAA
GAGCGGGTGTCCAAGCCTAAGATCAGCTGGACCTGCATCAACACCACACTGACCTGCGAAGT
GATGAACGGCACAGACCCCGAGCTGAACCTGTACCAGGATGGCAAACACCTGAAGCTGAGCC
AGCGCGTGATCACCCACAAGTGGACAACAAGCCTGAGCGCCAAGTTCAAGTGCACCGCCGGA
AACAAAGTGTCCAAAGAAAGCAGCGTGGAACCCGTGTCTTGCCCCGAGAAAGGCCTGGACAT
TCCTTGGCTGGGACATCTGCTCGTGGGACTGTCTGGCGCCTTCGGCTTTATCATCCTGGTGT
ACCTGCTGATCAACTGCCGGAACACAGGCCCCTGGCTGAAGAAAGTGCTGAAGTGCAACACC
CCTGATCCGAGCAAGTTCTTTAGCCAGCTGAGCAGCGAGCATGGCGGCGACGTTCAGAAATG
GCTGTCTAGCCCATTTCCTAGCAGCAGCTTCAGCCCTGGTGGACTGGCCCCTGAGATTAGCC
CTCTGGAAGTGCTGGAACGGGACAAAGTGACCCAGCTGCTCCTGCAGCAGGATAAGGTGCCA
GAACCTGCCAGCCTGTCCAGCAATCACAGCCTGACCAGCTGCTTTACCAACCAGGGCTACTT
CTTCTTCCATCTGCCTGACGCTCTGGAAATCGAGGCCTGCCAGGTGTACTTCACCTACGATC
CCTACAGCGAAGAGGACCCCGATGAAGGTGTTGCCGGTGCTCCTACCGGAAGCTCTCCTCAA
CCTCTGCAACCACTGAGCGGCGAGGATGACGCCTACTGCACATTCCCCAGCAGAGATGACCT
GCTGCTGTTCAGCCCTTCTCTGCTCGGTGGACCTTCTCCACCTTCTACAGCACCTGGCGGAT
CTGGCGCAGGCGAGGAAAGAATGCCTCCTAGCCTGCAAGAGAGAGTGCCCAGAGACTGGGAT
CCTCAGCCTCTCGGACCTCCTACACCAGGCGTGCCAGACCTGGTGGATTTTCAGCCTCCTCC
AGAGCTGGTGCTGAGAGAAGCTGGCGAAGAAGTGCCAGACGCCGGACCTAGAGAGGGCGTTA
GCTTTCCTTGGAGCAGACCTCCTGGACAGGGCGAGTTCAGAGCCCTGAATGCTAGACTGCCC
CTGAACACCGATGCCTACCTGTCTCTGCAAGAGCTGCAGGGACAAGACCCCACACACCTGGT
G

[0358] An exemplary protein sequence encoding a CSR 82BBz protein of the disclosure comprises or consists of the amino acid sequence of (CD8 signal peptide, CD2 extra cellular domain (D111H), IL2RB transmembrane domain, IL2RB intracellular domain #1, CD3z intracellular domain #2):

(SEQ ID NO: 42)
MALPVTALLLPLALLLHAARPKEITNALETWGALGQDINLDIPSFQMSDDIDDIKWEKTSDK
KKIAQFRKEKETFKEKDTYKLFKNGTLKIKHLKTDDQDIYKVSIYHTKGKNVLEKIFDLKIQ
ERVSKPKISWTCINTTLTCEVMNGTDPELNLYQDGKHLKLSQRVITHKWTTSLSAKFKCTAG
NKVSKESSVEPVSCPEKGLDIPWLGHLLVGLSGAFGFIILVYLLINCRNTGPWLKKVLKCNT
PDPSKFFSQLSSEHGGDVQKWLSSPFPSSSFSPGGLAPEISPLEVLERDKVTQLLLQQDKVP
EPASLSSNHSLTSCFTNQGYFFFHLPDALEIEACQVYFTYDPYSEEDPDEGVAGAPTGSSPQ
PLQPLSGEDDAYCTFPSRDDLLLFSPSLLGGPSPPSTAPGGSGAGEERMPPSLQERVPRDWD
PQPLGPPTPGVPDLVDFQPPPELVLREAGEEVPDAGPREGVSFPWSRPPGQGEFRALNARLP
LNTDAYLSLQELQGQDPTHLVRVKFSRSADAPAYKQGQNQLYNELNLGRREEYDVLDKRRGR
DPEMGGKPRRKNPQEGLYNELQKDKMAEAYSEIGMKGERRRGKGHDGLYQGLSTATKDTYDA
LHMQALPPR

[0359] An exemplary nucleotide sequence encoding a CSR 82BBz protein of the disclosure comprises or consists of the amino acid sequence of (CD8 signal peptide, CD2 extra cellular domain (D111H), IL2RB transmembrane domain, IL2RB intracellular domain #1, CD3z intracellular domain #2):

(SEQ ID NO: 195)
ATGGCTCTGCCTGTGACAGCTCTGCTGCTGCCTCTGGCTCTGCTTCTGCATGCCGCCAGACC
TAAAGAGATCACAAACGCCCTGGAAACCTGGGGAGCCCTCGGCCAGGATATTAACCTGGACA
TCCCCAGCTTCCAGATGAGCGACGACATCGATGACATCAAGTGGGAGAAAACCAGCGACAAG
AAGAAGATCGCCCAGTTCCGGAAAGAGAAAGAGACATTCAAAGAGAAGGACACCTACAAGCT
GTTCAAGAACGGCACCCTGAAGATCAAGCACCTGAAAACCGACGACCAGGACATCTATAAGG
TGTCCATCTACCACACCAAGGGCAAGAACGTGCTGGAAAAGATCTTCGACCTCAAGATCCAA
GAGCGGGTGTCCAAGCCTAAGATCAGCTGGACCTGCATCAACACCACACTGACCTGCGAAGT
GATGAACGGCACAGACCCCGAGCTGAACCTGTACCAGGATGGCAAACACCTGAAGCTGAGCC
AGCGCGTGATCACCCACAAGTGGACAACAAGCCTGAGCGCCAAGTTCAAGTGCACCGCCGGA
AACAAAGTGTCCAAAGAAAGCAGCGTGGAACCCGTGTCTTGCCCCGAGAAAGGCCTGGACAT
TCCTTGGCTGGGACATCTGCTCGTGGGACTGTCTGGCGCCTTCGGCTTTATCATCCTGGTGT
ACCTGCTGATCAACTGCCGGAACACAGGCCCCTGGCTGAAGAAAGTGCTGAAGTGCAACACC
CCTGATCCGAGCAAGTTCTTTAGCCAGCTGAGCAGCGAGCATGGCGGCGACGTTCAGAAATG
GCTGTCTAGCCCATTTCCTAGCAGCAGCTTCAGCCCTGGTGGACTGGCCCCTGAGATTAGCC
CTCTGGAAGTGCTGGAACGGGACAAAGTGACCCAGCTGCTCCTGCAGCAGGATAAGGTGCCA
GAACCTGCCAGCCTGTCCAGCAATCACAGCCTGACCAGCTGCTTTACCAACCAGGGCTACTT
CTTCTTCCATCTGCCTGACGCTCTGGAAATCGAGGCCTGCCAGGTGTACTTCACCTACGATC
CCTACAGCGAAGAGGACCCCGATGAAGGTGTTGCCGGTGCTCCTACCGGAAGCTCTCCTCAA
CCTCTGCAACCACTGAGCGGCGAGGATGACGCCTACTGCACATTCCCCAGCAGAGATGACCT
GCTGCTGTTCAGCCCTTCTCTGCTCGGTGGACCTTCTCCACCTTCTACAGCACCTGGCGGAT
CTGGCGCAGGCGAGGAAAGAATGCCTCCTAGCCTGCAAGAGAGAGTGCCCAGAGACTGGGAT
CCTCAGCCTCTCGGACCTCCTACACCAGGCGTGCCAGACCTGGTGGATTTTCAGCCTCCTCC
AGAGCTGGTGCTGAGAGAAGCTGGCGAAGAAGTGCCAGACGCCGGACCTAGAGAGGGCGTTA
GCTTTCCTTGGAGCAGACCTCCTGGACAGGGCGAGTTCAGAGCCCTGAATGCTAGACTGCCC
CTGAACACCGATGCCTACCTGTCTCTGCAAGAGCTGCAGGGACAAGACCCCACACACCTCGT
CAGAGTGAAGTTCAGCAGAAGCGCCGACGCTCCCGCCTATAAGCAGGGACAGAACCAGCTGT
ACAACGAGCTGAATCTGGGGCGCAGAGAAGAGTACGATGTGCTGGACAAGCGGAGAGGCAGA
GATCCTGAGATGGGCGGCAAGCCCAGACGGAAGAATCCTCAAGAGGGCCTGTATAATGAGCT
GCAGAAAGACAAGATGGCCGAGGCCTACTCCGAGATCGGAATGAAGGGCGAGCGCAGAAGAG
GCAAGGGACACGATGGACTGTATCAGGGCCTGAGCACCGCCACCAAGGATACCTATGATGCC
CTGCACATGCAGGCCCTGCCTCCAAGA

[0360] An exemplary protein sequence encoding a CSR 822B protein of the disclosure comprises or consists of the amino acid sequence of (CD8 signal peptide, CD2 extra cellular domain (D111H), CD2 transmembrane domain, IL2RB intracellular domain):

(SEQ ID NO: 43)
MALPVTALLLPLALLLHAARPKEITNALETWGALGQDINLDIPSFQMSDDIDDIKWEKTSDK
KKIAQFRKEKETFKEKDTYKLFKNGTLKIKHLKTDDQDIYKVSIYHTKGKNVLEKIFDLKIQ
ERVSKPKISWTCINTTLTCEVMNGTDPELNLYQDGKHLKLSQRVITHKWTTSLSAKFKCTAG
NKVSKESSVEPVSCPEKGLDIYLIIGICGGGSLLMVFVALLVFYITNCRNTGPWLKKVLKCN
TPDPSKFFSQLSSEHGGDVQKWLSSPFPSSSFSPGGLAPEISPLEVLERDKVTQLLLQQDKV
PEPASLSSNHSLTSCFTNQGYFFFHLPDALEIEACQVYFTYDPYSEEDPDEGVAGAPTGSSP
QPLQPLSGEDDAYCTFPSRDDLLLFSPSLLGGPSPPSTAPGGSGAGEERMPPSLQERVPRDW
DPQPLGPPTPGVPDLVDFQPPPELVLREAGEEVPDAGPREGVSFPWSRPPGQGEFRALNARL
PLNTDAYLSLQELQGQDPTHLV

[0361] An exemplary nucleotide sequence encoding a CSR 822B protein of the disclosure comprises or consists of the amino acid sequence of (CD8 signal peptide, CD2 extra cellular domain (D111H), CD2 transmembrane domain, IL2RB intracellular domain):

(SEQ ID NO: 196)
ATGGCTCTGCCTGTGACAGCTCTGCTGCTGCCTCTGGCTCTGCTTCTGC
ATGCCGCCAGACCTAAAGAGATCACAAACGCCCTGGAAACCTGGGGAGC
CCTCGGCCAGGATATTAACCTGGACATCCCCAGCTTCCAGATGAGCGAC
GACATCGATGACATCAAGTGGGAGAAAACCAGCGACAAGAAGAAGATCG
CCCAGTTCCGGAAAGAGAAAGAGACATTCAAAGAGAAGGACACCTACAA
GCTGTTCAAGAACGGCACCCTGAAGATCAAGCACCTGAAAACCGACGAC
CAGGACATCTATAAGGTGTCCATCTACCACACCAAGGGCAAGAACGTGC
TGGAAAAGATCTTCGACCTCAAGATCCAAGAGCGGGTGTCCAAGCCTAA
GATCAGCTGGACCTGCATCAACACCACACTGACCTGCGAAGTGATGAAC
GGCACAGACCCCGAGCTGAACCTGTACCAGGATGGCAAACACCTGAAGC
TGAGCCAGCGCGTGATCACCCACAAGTGGACAACAAGCCTGAGCGCCAA
GTTCAAGTGCACCGCCGGAAACAAAGTGTCCAAAGAAAGCAGCGTGGAA
CCCGTGTCTTGCCCCGAGAAAGGACTGGACATCTACCTGATCATCGGCA
TCTGTGGCGGCGGAAGCCTGCGATGGTGTTTGTTGCCCTGCTGGTGTTC
TACATCACCAACTGCAGAAACACAGGCCCCTGGCTGAAGAAAGTGCTGA
AGTGCAACACCCCTGATCCGAGCAAGTTCTTTAGCCAGCTGAGCAGCGA
GCATGGCGGCGACGTTCAGAAATGGCTGTCTAGCCCATTTCCTAGCAGC
AGCTTCAGCCCTGGTGGACTGGCCCCTGAGATTAGCCCTCTGGAAGTGC
TGGAACGGGACAAAGTGACCCAGCTGCTCCTGCAGCAGGATAAGGTGCC
AGAACCTGCCAGCCTGTCCAGCAATCACAGCCTGACCAGCTGCTTTACC
AACCAGGGCTACTTCTTCTTCCATCTGCCTGACGCTCTGGAAATCGAGG
CCTGCCAGGTGTACTTCACCTACGATCCCTACAGCGAAGAGGACCCCGA
TGAAGGTGTTGCCGGTGCTCCTACCGGAAGCTCTCCTCAACCTCTGCAA
CCACTGAGCGGCGAGGATGACGCCTACTGCACATTCCCCAGCAGAGATG
ACCTGCTGCTGTTCAGCCCTTCTCTGCTCGGTGGACCTTCTCCACCTTC
TACAGCACCTGGCGGATCTGGCGCAGGCGAGGAAAGAATGCCTCCTAGC
CTGCAAGAGAGAGTGCCCAGGAGACTGGGATCCTCAGCCTCTCGGACCT
CCTACACCAGGCGTGCCAGACCTGGTGGATTTTCAGCCTCCTCCAGAGC
TGGTGCTGAGAGAAGCTGGCGAAGAAGTGCCAGACGCCGGACCTAGAGA
GGGCGTTAGCTTTCCTTGGAGCAGACCTCCTGGACAGGGCGAGTTCAGA
GCCCTGAATGCTAGACTGCCCCTGAACACCGATGCCTACCTGTCTCTGC
AAGAGCTGCAGGGACAAGACCCCACACACCTGGTG

[0362] An exemplary protein sequence encoding a CSR 822Bz protein of the disclosure comprises or consists of the amino acid sequence of (CD8 signal peptide, CD2 extra cellular domain (D111H), CD2 transmembrane domain, IL2RB intracellular domain #1, CD3z intracellular domain #2):

(SEQ ID NO: 44)
MALPVTALLLPLALLLHAARPKEITNALETWGALGQDINLDIPSFQMSD
DIDDIKWEKTSDKKKIAQFRKEKETFKEKDTYKLFKNGTLKIKHLKTDD
QDIYKVSIYHTKGKNVLEKIFDLKIQERVSKPKISWTCINTTLTCEVMN
GTDPELNLYQDGKHLKLSQRVITHKWTTSLSAKFKCTAGNKVSKESSVE
PVSCPEKGLDIYLIIGICGGGSLLMVFVALLVFYITNCRNTGPWLKKVL
KCNTPDPSKFFSQLSSEHGGDVQKWLSSPFPSSSFSPGGLAPEISPLEV
LERDKVTQLLLQQQDKVPEPASLSSNHSLTCFTNQGYFFFHLPDALEIE
ACQVYFTYDPYSEEDPDEGVAGAPTGSSPQPLQPLSGEDDAYCTFPSRD
DLLLFSPSLLGGPSPPSTAPGGSGAGEERMPPSLQERVPRDWDPQPLGP
PTPGVPDLVDFQPPPELVLREAGEEVPDAGPREGVSFPWSRPPGQEFRA
LNARLPLNTDAYLSLQELQGQDPTHLVRVKFSRSADAPAYKQGQNQLYN
ELNLGRREEYDVLDKRRGRDPEMGGKPRRKNPQEGLYNELQKDKMAEAY
SEIGMKGERRRGKGHDGLYQGLSTATKDTYDALHNQALPPR

[0363] An exemplary nucleotide sequence encoding a CSR 822Bz protein of the disclosure comprises or consists of the amino acid sequence of (CD8 signal peptide, CD2 extra cellular domain (D111H), CD2 transmembrane domain, IL2RB intracellular domain #1, CD3z intracellular domain #2):

(SEQ ID NO: 197)
ATGGCTCTGCCTGTGACAGCTCTGCTGCTGCCTCTGGCTCTGCTTCTGC
ATGCCGCCAGACCTAAAGAGATCACAAACGCCCTGGAAACCTGGGGAGC
CCTCGGCCAGGATATTAACCTGGACATCCCCAGCTTCCAGATGAGCGAC
GACATCGATGACATCAAGTGGGAGAAAACCAGCGACAAGAAGAAGATCG
CCCAGTTCCGGAAAGAGAAAGAGACATTCAAAGAGAAGGACACCTACAA
GCTGTTCAAGAACGGCACCCTGAAGATCAAGCACCTGAAAACCGACGAC
CAGGACATCTATAAGGTGTCCATCTACCACACCAAGGGCAAGAACGTGC
TGGAAAAGATCTTCGACCTCAAGATCCAAGAGCGGGTGTCCAAGCCTAA
GATCAGCTGGACCTGCATCAACACCACACTGACCTGCGAAGTGATGAAC
GGCACAGACCCCGAGCTGAACCTGTACCAGGATGGCAAACACCTGAAGC
TGAGCCAGCGCGTGATCACCCACAAGTGGACAACAAGCCTGAGCGCCAA
GTTCAAGTGCACCGCCGGAAACAAAGTGTCCAAAGAAAGCAGCGTGGAA
CCCGTGTCTTGCCCCGAGAAAGGACTGGACATCTACCTGATCATCGGCA
TCTGTGGCGGCGGAAGCCTGCTGATGGTGTTTGTTGCCCTGCTGGTGTT
CTACATCACCAACTGCAGAAACACAGGCCCCTGGCTGAAGAAAGTGCTG
AAGTGCAACACCCCTGATCCGAGCAAGTTCTTTAGCCAGCTGAGCAGCG
AGCATGGCGGCGACGTTCAGAAATGGCTGTCTAGCCCATTTCCTAGCAG
CAGCTTCAGCCCTGGTGGACTGGCCCCTGAGATTAGCCCTCTGGAAGTG
CTGGAACGGGACAAAGTGACCCAGCTGCTCCTGCAGCAGGATAAGGTGC
CAGAACCTGCCAGCCTGTCCAGCAATCACAGCCTGACCAGCTGCTTTAC
CAACCAGGGCTACTTCTTCTTCCATCTGCCTGACGCTCTGGAAATCGAG
GCCTGCCAGGTGTACTTCACCTACGATCCCTACAGCGAAGAGGACCCCG
ATGAAGGTGTTGCCGGTGCTCCTACCGGAAGCTCTCCTCAACCTCTGCA
ACCACTGAGCGGCGAGGATGACGCCTACTGCACATTCCCCAGCAGAGAT
GACCTGCTGCTGTTCAGCCCTTCTCTGCTCGGTGGACCTTCTCCACCTT
CTACAGCACCTGGCGGATCTGGCGCAGGCGAGGAAAGAATGCCTCCTAG
CCTGCAAGAGAGAGTGCCCAGAGACTGGGATCCTCAGCCTCTCGGACCT
CCTACACCAGGCGTGCCAGACCTGGTGGATTTTCAGCCTCCTCCAGAGC
TGGTGCTGAGAGAAGCTGGCGAAGAAGTGCCAGACGCCGGACCTAGAGA
GGGCGTTAGCTTTCCTTGGAGCAGACCTCCTGGACAGGGCGAGTTCAGA
GCCCTGAATGCTAGACTGCCCCTGAACACCGATGCCTACCTGTCTCTGC
AAGAGCTGCAGGGACAAGACCCCACACACCTCGTCAGAGTGAAGTTCAG
CAGAAGCGCCGACGCTCCCGCCTATAAGCAGGGACAGAACCAGCTGTAC
AACGAGCTGAATCTGGGGCGCAGAGAAGAGTACGATGTGCTGGACAAGC
GGAGAGGCTGTACAACGAGCTGAATCTGGGGCGCAGAGAAGAGTACGAT
GTGCTGGACAAGCGGAGAGGCAGAGATCCTGAGATGGGCGGCAAGCCCA
GACGGAAGAATCCTCAAGAGGGCCTGTATAATGAGCTGCAGAAAGACAA
GATGGCCGAGGCCTACTCCGAGATCGGAATGAAGGGCGAGCGCAGAAGA
GGCAAGGGACACGATGGACTGTATCAGGGCCTGAGCACCGCCACCAAGG
ATACCTATGATGCCCTGCACATGCAGGCCCTGCCTCCAAGA

[0364] An exemplary protein sequence encoding a CSR 8GGG protein of the disclosure comprises or consists of the amino acid sequence of (CD8 signal peptide, IL2RG extra cellular domain, IL2RG transmembrane domain, IL2RG intracellular domain):

(SEQ ID NO: 45)
MALPVTALLLPLALLLHAARPLNTTLILPNGNEDTTADFFLTTMPTDSL
SVSTLPLPEVQCFVFNVEYMNCTWNSSSEPQPTNLTLHYWYKNSDNDKV
QKCSHYLFSEEITSGCQLQKKEIHLYQTFVVQLQDPREPRRQATQMLKL
QNLVIPWAPENLTLHKLSESQLELNWNNRFLNHCLEHLVQYRTDWDHSW
TEQSVDYRHKFSLPSVDGQKRYTFRVRSRFNPLCGSAQHWSEWSHPIHW
GSNTSKENPFLFALEAVVISVGSMGLIISLLCVYFWLERTMPRIPTLKN
LEDLVTEYHGNFSAWSGVSKGLAESLQPDYSERLCLVSEIPPKGGALGE
GPGASPCNQHSPYWAPPCYTLKPET

[0365] An exemplary nucleotide sequence encoding a CSR 8GGG protein of the disclosure comprises or consists of the amino acid sequence of (CD8 signal peptide, IL2RG extra cellular domain, IL2RG transmembrane domain, IL2RG intracellular domain):

(SEQ ID NO: 198)
ATGGCTCTGCCTGTGACAGCTCTGCTGCTGCCTCTGGCTCTGCTTCTGC
ATGCTGCCAGACCTCTGAACACCACCATCCTGACACCTAACGGCAACGA
GGATACAACCGCCGACTTCTTCCTGACCACCATGCCTACCGATAGCCTG
AGCGTGTCCACACTGCCTCTGCCTGAGGTGCAGTGCTTCGTGTTCAACG
TCGAGTACATGAACTGCACCTGGAACAGCAGCAGCGAGCCCCAGCCTAC
CAATCTGACACTGCACTACTGGTACAAGAACAGCGACAACGACAAGGTG
CAGAAGTGCAGCCACTACCTGTTCAGCGAGGAAATCACCAGCGGCTGCC
AGCTGCAGAAGAAAGAGATCCACCTGTACCAGACCTTCGTGGTTCAGCT
GCAGGACCCCAGAGAGCCTAGAAGGCAGGCTACCCAGATGCTGAAACTG
CAGAACCTGGTCATCCCCTGGGCTCCCGAAAACCTGACTCTGCACAAGC
TGAGCGAGAGCCAGCTGGAACTGAACTGGAACAACCGGTTCCTGAACCA
CTGCCTGGAACACCTGGTGCAGTACAGAACCGACTGGGACCACAGCTGG
ACAGAGCAGAGCGTGGACTACCGGCACAAGTTCAGCCTGCCATCTGTGG
ACGGCCAGAAGCGGTACACCTTTAGAGTGCGGAGCCGGTTCAATCCCCT
GTGTGGATCTGCTCAGCATTGGAGCGAGTGGTCACACCCTATCCACTGG
GGCAGCAACACCAGCAAAGAGAACCCCTTCCTGTTCGCCCTGGAAGCCG
TGGTTATCAGCGTGGGCTCTATGGGCCTGATCATCAGCCTGCTGTGCGT
GTACTTCTGGCTGGAAAGAACCATGCCTCGGATCCCCACACTGAAGAAT
CTGGAAGATCTGGTCACCGAGTACCACGGCAACTTCTCTGCTTGGAGCG
GCGTGTCAAAAGGCCTGGCCGAATCTCTGCAGCCCGACTACTCTGAGAG
ACTGTGCCTGGTGTCTGAGATCCCTCCTAAAGGCGGAGCCCTCGGAGAA
GGACCTGGCGCCTCTCCATGTAATCAGCACAGCCCTTATTGGGCCCCTC
CTTGCTACACCCTGAAGCCTGAGACA

[0366] An exemplary protein sequence encoding a CSR 8GGGz protein of the disclosure comprises or consists of the amino acid sequence of (CD8 signal peptide, IL2RG extra cellular domain, IL2RG transmembrane domain, IL2RG intracellular domain #1, CD3z intracellular domain #2):

(SEQ ID NO: 46)
MALPVTALLLPLALLLHAARPLNTTILTPNGNEDTTADFFLTTMPTDSL
SVSTLPLPEVQCFVFNVEYMNCTWNSSSEPQPTNLTLHYWYKNSDNDKV
QKCSHYLFSEEITSGCQLQKKEIHLYQTFVVQLQDPREPRRQATQMLKL
QNLVIPWAPENLTLHKLSESQLELNWNNRFLNHCLEHLVQYRTDWDHSW
TEQSVDYRHKFSLPSVDGQKRYTFRVRSRFNPLCGSAQHWSEWSHPIHW
GSNTSKENPFLFALEAVVISVGSMGLIISLLCVYFWLERTMPRIPTLKN
LEDLVTEYHGNFSAWSGVSKGLAESLQPDYSERLCLVSEIPPKGGALGE
GPGASPCNQHSPYWAPPCYTLKPETRVKFSRSADAPAYKQGQNQLYNEL
NLGRREEYDVLDKRRGRDPEMGGKPRRKNPQEGLYNELQKDKMAEAYSE
IGMKGERRRGKGHDGLYQGLSTATKDTYDALHMQALPRR

[0367] An exemplary nucleotide sequence encoding a CSR 8GGGz protein of the disclosure comprises or consists of the amino acid sequence of (CD8 signal peptide, IL2RG extra cellular domain, IL2RG transmembrane domain, IL2RG intracellular domain #1, CD3z intracellular domain #2):

(SEQ ID NO: 199)
ATGGCTCTGCCTGTGACAGCTCTGCTGCTGCCTCTGGCTCTGCTTCTGC
ATGCTGCCAGACCTCTGAACACCACCATCCTGACACCTAACGGCAACGA
GGATACAACCGCCGACTTCTTCCTGACCACCATGCCTACCGATAGCCTG
AGCGTGTCCACACTGCCTCTGCCTGAGGTGCAGTGCTTCGTGTTCAACG
TCGAGTACATGAACTGCACCTGGAACAGCAGCAGCGAGCCCCAGCCTAC
CAATCTGACACTGCACTACTGGTACAAGAACAGCGACAACGACAAGGTG
CAGAAGTGCAGCCACTACCTGTTCAGCGAGGAAATCACCAGCGGCTGCC
AGCTGCAGAAGAAAGAGATCCACCTGTACCAGACCTTCGTGGTTCAGCT
GCAGGACCCCAGAGAGCCTAGAAGGCAGGCTACCCAGATGCTGAAACTG
CAGAACCTGGTCATCCCCTGGGCTCCCGAAAACCTGACTCTGCACAAGC
TGAGCGAGAGCCAGCTGGAACTGAACTGGAACAACCGGTTCCTGAACCA
CTGCCTGGAACACCTGGTGCAGTACAGAACCGACTGGGACCACAGCTGG
ACAGAGCAGAGCGTGGACTACCGGCACAAGTTCAGCCTGCCATCTGTGG
ACGGCCAGAAGCGGTACACCTTTAGAGTGCGGAGCCGGTTCAATCCCCT
GTGTGGATCTGCTCAGCATTGGAGCGAGTGGTCACACCCTATCCACTGG
GGCAGCAACACCAGCAAAGAGAACCCCTTCCTGTTCGCCCTGGAAGCCG
TGGTTATCAGCGTGGGCTCTATGGGCCTGATCATCAGCCTGCTGTGCGT
GTACTTCTGGCTGGAAAGAACCATGCCTCGGATCCCCACACTGAAGAAT
CTGGAAGATCTGGTCACCGAGTACCACGGCAACTTCTCTGCTTGGAGCG
GCGTGTCAAAAGGCCTGGCCGAATCTCTGCAGCCCGACTACTCTGAGAG
ACTGTGCCTGGTGTCTGAGATCCCTCCTAAAGGCGGAGCCCTCGGAGAA
GGACCTGGCGCCTCTCCATGTAATCAGCACAGCCCTTATTGGGCCCCTC
CTTGCTACACCCTGAAGCCTGAGACAAGAGTGAAGTTCAGCAGAAGCGC
CGACGCTCCCGCCTATAAGCAGGGACAGAACCAGCTGTACAACGAGCTG
AACCTGGGGAGAAGAGAAGAGTACGACGTGCTGGACAAGCGGAGAGGCA
GAGATCCTGAGATGGGCGGCAAGCCCAGACGGAAGAATCCTCAAGAGGG
CCTGTATAATGAGCTGCAAAAGGACAAGATGGCCGAGGCTACAGCGAGA
TCGGAATGAAGGGCGAGCGCAGAAGAGGCAAGGGACACGATGGACTGTA
CCAGGGCCTGAGCACCGCCACCAAGGATACCTATGATGCCCTGCACATG
CAGGCCCTGCCTCCAAGA

[0368] An exemplary protein sequence encoding a CSR 82GG protein of the disclosure comprises or consists of the amino acid sequence of (CD8 signal peptide, CD2 extra cellular domain (D111H), IL2RG transmembrane domain, IL2RG intracellular domain):

(SEQ ID NO: 47)
MALPVTALLLPLALLLHAARPKEITNALETWGALGQDINLDIPSFQMSD
DIDDIKWEKTSDKKKIAQFRKEKETFKEKDTYKLFKNGTLKIKHLKTDD
QDIYKVSIYHTKGKNVLEKIFDLKIQERVSKPKISWTCINTTLTCEVMN
GTDPELNLYQDGKHLKLSQRVITHKWTTSLSAKFKCTAGNKVSKESSVE
PVSCPEKGLDAVVISVGSMGLIISLLCVYFWLERTMPRIPTLKNLEDLV
TEYHGNFSAWSGVSKGLAESLQPDYSERLCLVSEIPPKGGALGEGPGAS
PCNQHSPYWAPPCYTLKPET

[0369] An exemplary nucleotide sequence encoding a CSR 82GG protein of the disclosure comprises or consists of the amino acid sequence of (CD8 signal peptide, CD2 extra cellular domain (D111H), IL2RG transmembrane domain, IL2RG intracellular domain):

(SEQ ID NO: 200)
ATGGCTCTGCCTGTGACAGCTCTGCTGCTGCCTCTGGCTCTGCTTCTGC
ATGCCGCCAGACCTAAAGAGATCACAAACGCCCTGGAAACCTGGGGAGC
CCTCGGCCAGGATATTAACCTGGACATCCCCAGCTTCCAGATGAGCGAC
GACATCGATGACATCAAGTGGGAGAAAACCAGCGACAAGAAGAAGATCG
CCCAGTTCCGGAAAGAGAAAGAGACATTCAAAGAGAAGGACACCTACAA
GCTGTTCAAGAACGGCACCCTGAAGATCAAGCACCTGAAAACCGACGAC
CAGGACATCTATAAGGTGTCCATCTACCACACCAAGGGCAAGAACGTGC
TGGAAAAGATCTTCGACCTCAAGATCCAAGAGCGGGTGTCCAAGCCTAA
GATCAGCTGGACCTGCATCAACACCACACTGACCTGCGAAGTGATGAAC
GGCACAGACCCCGAGCTGAACCTGTACCAGGATGGCAAACACCTGAAGC
TGAGCCAGCGCGTGATCACCCACAAGTGGACAACAAGCCTGAGCGCCAA
GTTCAAGTGCACCGCCGGAAACAAAGTGTCCAAAGAAAGCAGCGTGGAA
CCCGTGTCTTGCCCCGAGAAAGGACTGGATGCCGTGGTCATCAGCGTGG
GCTCTATGGGCCTGATCATCAGCCTGCTGTGCGTGTACTTCTGGCTGGA
ACGGACCATGCCTCGGATCCCCACACTGAAGAACCTGGAAGATCTGGTC
ACCGAGTACCACGGCAACTTCTCTGCTTGGAGTGGCGTGTCAAAAGGCC
TGGCCGAAAGCCTGCAGCCTGACTACTCTGAGAGACTGTGCCTGGTGTC
TGAGATCCCTCCTAAAGGCGGAGCCCTTGGAGAAGGACCTGGCGCCTCT
CCATGTAACCAGCACAGCCCTTATTGGGCCCCTCCTTGCTACACTCTGA
AGCCCGAGACA

[0370] An exemplary protein sequence encoding a CSR 82GGz protein of the disclosure comprises or consists of the amino acid sequence of (CD8 signal peptide, CD2 extra cellular domain (D111H), IL2RG transmembrane domain, IL2RG intracellular domain #1, CD3z intracellular domain #2).

(SEQ ID NO: 48)
MALPVTALLLPLALLLHAARPKEITNALETWGALGQDINLDIPSFQMSD
DIDDIKWEKTSDKKKIAQFRKEKETFKEKDTYKLFKNGTLKIKHLKTDD
QDIYKVSIYHTKGKNVLEKIFDLKIQERVSKPKISWTCINTTLTCEVMN
GTDPELNLYQDGKHLKLSQRVITHKWTTSLSAKFKCTAGNKVSKESSVE
PVSCPEKGLDAVVISVGSMGLIISLLCVYFWLERTMPRIPTLKNLEDLV
TEYHGNFSAWSGVSKGLAESLQPDYSERLCLVSEIPPKGGALGEGPGAS
PCNQHSPYWAPPCYTLKPETRVKFSRSADAPAYKQGQNQLYNELNLGRR
EEYDVLDKRRGRDPEMGGKPRRKNPQEGLYNELQKDKMAEAYSEIGMKG
ERRRGKGHDGLYQGLSTATKDTYDALHMQALPPR

[0371] An exemplary nucleotide sequence encoding a CSR 82GGz protein of the disclosure comprises or consists of the amino acid sequence of (CD8 signal peptide, CD2 extra cellular domain (D111H), IL2RG transmembrane domain, IL2RG intracellular domain #1, CD3z intracellular domain #2):

(SEQ ID NO: 201)
ATGGCTCTGCCTGTGACAGCTCTGCTGCTGCCTCTGGCTCTGCTTCTGC
ATGCCGCCAGACCTAAAGAGATCACAAACGCCCTGGAAACCTGGGGAGC
CCTCGGCCAGGATATTAACCTGGACATCCCCAGCTTCCAGATGAGCGAC
GACATCGATGACATCAAGTGGGAGAAAACCAGCGACAAGAAGAAGATCG
CCCAGTTCCGGAAAGAGAAAGAGACATTCAAAGAGAAGGACACCTACAA
GCTGTTCAAGAACGGCACCCTGAAGATCAAGCACCTGAAAACCGACGAC
CAGGACATCTATAAGGTGTCCATCTACCACACCAAGGGCAAGAACGTGC
TGGAAAAGATCTTCGACCTCAAGATCCAAGAGCGGGTGTCCAAGCCTAA
GATCAGCTGGACCTGCATCAACACCACACTGACCTGCGAAGTGATGAAC
GGCACAGACCCCGAGCTGAACCTGTACCAGGATGGCAAACACCTGAAGC
TGAGCCAGCGCGTGATCACCCACAAGTGGACAACAAGCCTGAGCGCCAA
GTTCAAGTGCACCGCCGGAAACAAAGTGTCCAAAGAAAGCAGCGTGGAA
CCCGTGTCTTGCCCCGAGAAAGGACTGGATGCCGTGGTCATCAGCGTGG
GCTCTATGGGCCTGATCATCAGCCTGCTGTGCGTGTACTTCTGGCTGGA
ACGGACCATGCCTCGGATCCCCACACTGAAGAACCTGGAAGATCTGGTC
ACCGAGTACCACGGCAACTTCTCTGCTTGGAGTGGCGTGTCAAAAGGCC
TGGCCGAAAGCCTGCAGCCTGACTACTCTGAGAGACTGTGCCTGGTGTC
TGAGATCCCTCCTAAAGGCGGAGCCCTTGGAGAAGGACCTGGCGCCTCT
CCATGTAACCAGCACAGCCCTTATTGGGCCCCTCCTTGCTACACTCTGA
AGCCCGAGACAAGAGTGAAGTTCAGCAGAAGCGCCGACGCTCCCGCCTA
TAAGCAGGGACAGAACCAGCTGTACAACGAGCTGAATCTGGGGCGCAGA
GAAGAGTACGATGTGCTGGACAAGCGGAGAGGCAGAGATCCTGAGATGG
GCGGCAAGCCCAGACGGAAGAATCCTCAAGAGGGCCTGTATAATGAGCT
GCAGAAAGACAAGATGGCCGAGGCCTACAGCGAGATCGGAATGAAGGGC
GAGCGCAGAAGAGGCAAGGGACACGATGGACTGTATACAGGGCCTGAGC
ACCGCCACCAAGGATACCTATGATGCCCTGCACATGCAGGCCCTGCCTC
CAAGA

[0372] An exemplary protein sequence encoding a CSR 822G protein of the disclosure comprises or consists of the amino acid sequence of (CD8 signal peptide, CD2 extra cellular domain (D111H), CD2 transmembrane domain, IL2RG intracellular domain):

(SEQ ID NO: 49)
MALPVTALLLPLALLLHAARPKEITNALETWGALGQDINLDIPSFQMSD
DIDDIKWEKTSDKKKIAQFRKEKETFKEKDTYKLFKNGTLKIKHLKTDD
QDIYKVSIYHTKGKNVLEKIFDLKIQERVSKPKISWTCINTTLTCEVMN
GTDPELNLYQDGKGHLKLSQRVITHKWTTSLSAKFKCTAGNKVSKESSV
EPVSCPEKGLDIYLIIGICGGGSLLMVFVALLVFYITERTMPRIPTLKN
LEDLVTEYHGNFSAWSGVSKGLAESLQPDYSERLCLVSEIPPKGGALGE
GPGASPCNQHSPYWAPPCYTLKPET

[0373] An exemplary nucleotide sequence encoding a CSR 822G protein of the disclosure comprises or consists of the amino acid sequence of (CD8 signal peptide, CD2 extra cellular domain (D111H), CD2 transmembrane domain, IL2RG intracellular domain):

(SEQ ID NO: 202)
ATGGCTCTGCCTGTGACAGCTCTGCTGCTGCCTCTGGCTCTGCTTCTG
CATGCCGCCAGACCTAAAGAGATCACAAACGCCCTGGAAACCTGGGGA
GCCCTCGGCCAGGATATTAACCTGGACATCCCCAGCTTCCAGATGAGC
GACGACATCGATGACATCAAGTGGGAGAAAACCAGCGACAAGAAGAAG
ATCGCCCAGTTCCGGAAAGAGAAAGAGACATTCAAAGAGAAGGACACC
TACAAGCTGTTCAAGAACGGCACCCTGAAGATCAAGCACCTGAAAACC
GACGACCAGGACATCTATAAGGTGTCCATCTACCACACCAAGGGCAAG
AACGTGCTGGAAAAGATCTTCGACCTCAAGATCCAAGAGCGGGTGTCC
AAGCCTAAGATCAGCTGGACCTGCATCAACACCACACTGACCTGCGAA
GTGATGAACGGCACAGACCCCGAGCTGAACCTGTACCAGGATGGCAAA
CACCTGAAGCTGAGCCAGCGCGTGATCACCCACAAGTGGACAACAAGC
CTGAGCGCCAAGTTCAAGTGCACCGCCGGAAACAAAGTGTCCAAAGAA
AGCAGCGTGGAACCCGTGTCTTGCCCCGAGAAAGGACTGGACATCTAC
CTGATCATCGGCATCTGTGGCGGCGGAAGCCTGCTGATGGTGTTTGTT
GCCCTGCTGGTGTTCTACATCACCGAGCGGACCATGCCTCGGATCCCC
ACACTGAAGAACCTGGAAGATCTGGTCACCGAGTACCACGGCAACTTC
TCTGCTTGGAGTGGCGTGTCAAAAGGCCTGGCCGAAAGCCTGCAGCCT
GACTACTCTGAGAGACTGTGCCTGGTGTCTGAGATCCCTCCTAAAGGC
GGAGCCCTTGGAGAAGGACCTGGCGCCTCTCCATGTAACCAGCACAGC
CCTTATTGGGCCCCTCCTTGCTACACTCTGAAGCCCGAGACA

[0374] An exemplary protein sequence encoding a CSR 822 Gz protein of the disclosure comprises or consists of the amino acid sequence of (CD8 signal peptide, CD2 extra cellular domain (D111H), CD2 transmembrane domain, IL2RG intracellular domain #1, CD3z intracellular domain #2):

(SEQ ID NO: 50)
MALPVTALLLPLALLLHAARPKEITNALETWGALGQDINLDIPSFQMSD
DIDDIKWEKTSDKKKIAQFRKEKETFKEKDTYKLFKNGTLKIKHLKTDD
QDIYKVSIYHTKGKNVLEKIFDLKIQERVSKPKISWTCINTTLTCEVMN
GTDPELNLYQDGKHLKLSQRVITHKWTTSLSAKFKCTAGNKVSKESSVE
PVSCPEKGLDIYLIIGICGGGSLLMVFVALLVFYITERTMPRIPTLKNL
EDLVTEYHGNFSAWSGVSKGLAESLQPDYSERLCLVSEIPPKGGALGEG
PGASPCNQHSPYWAPPCYTLKPETRVKFSRSADAPAYKQGQNQLYNELN
LGRREEYDVLDKRRGRDPEMGGKPRRKNPQEGLYNELQKDKMAEAYSEI
GMKGERRRGKGHDGLYQGLSTATKDTYDALHMQALPPR

[0375] An exemplary nucleotide sequence encoding a CSR 822 Gz protein of the disclosure comprises or consists of the amino acid sequence of (CD8 signal peptide, CD2 extra cellular domain (D111H), CD2 transmembrane domain, IL2RG intracellular domain #1, CD3z intracellular domain #2):

(SEQ ID NO: 203)
ATGGCTCTGCCTGTGACAGCTCTGCTGCTGCCTCTGGCTCTGCTTCTGC
ATGCCGCCAGACCTAAAGAGATCACAAACGCCCTGGAAACCTGGGGAGC
CCTCGGCCAGGATATTAACCTGGACATCCCCAGCTTCCAGATGAGCGAC
GACATCGATGACATCAAGTGGGAGAAAACCAGCGACAAGAAGAAGATCG
CCCAGTTCCGGAAAGAGAAAGAGACATTCAAAGAGAAGGACACCTACAA
GCTGTTCAAGAACGGCACCCTGAAGATCAAGCACCTGAAAACCGACGAC
CAGGACATCTATAAGGTGTCCATCTACCACACCAAGGGCAAGAACGTGC
TGGAAAAGATCTTCGACCTCAAGATCCAAGAGCGGGTGTCCAAGCCTAA
GATCAGCTGGACCTGCATCAACACCACACTGACCTGCGAAGTGATGAAC
GGCACAGACCCCGAGCTGAACCTGTACCAGGATGGCAAACACCTGAAGC
TGAGCCAGCGCGTGATCACCCACAAGTGGACAACAAGCCTGAGCGCCAA
GTTCAAGTGCACCGCCGGAAACAAAGTGTCCAAAGAAAGCAGCGTGGAA
CCCGTGTCTTGCCCCGAGAAAGGACTGGACATCTACCTGATCATCGGCA
TCTGTGGCGGCGGAAGCCTGCTGATGGTGTTTGTTGCCCTGCTGGTGTT
CTACATCACCGAGCGGACCATGCCTCGGATCCCCACACTGAAGAACCTG
GAAGATCTGGTCACCGAGTACCACGGCAACTTCTCTGCTTGGAGTGGCG
TGTCAAAAGGCCTGGCCGAAAGCCTGCAGCCTGACTACTCTGAGAGACT
GTGCCTGGTGTCTGAGATCCCTCCTAAAGGCGGAGCCCTTGGAGAAGGA
CCTGGCGCCTCTCCATGTAACCAGCACAGCCCTTATTGGGCCCCTCCTT
GCTACACTCTGAAGCCCGAGACAAGAGTGAAGTTCAGCAGAAGCGCCGA
CGCTCCCGCCTATAAGCAGGGACAGAACCAGCTGTACAACGAGCTGAAT
CTGGGGCGCAGAGAAGAGTACGATGTGCTGGACAAGCGGAGAGGCAGAG
ATCCTGAGATGGGCGGCAAGCCCAGACGGAAGAATCCTCAAGAGGGCCT
GTATAATGAGCTGCAGAAAGACAAGATGGCCGAGGCCTACAGCGAGATC
GGAATGAAGGGCGAGCGCAGAAGAGGCAAGGGACACGATGGACTGTATC
AGGGCCTGAGCACCGCCACCAAGGATACCTATGATGCCCTGCACATGCA
GGCCCTGCCTCCAAGA

[0376] An exemplary protein sequence encoding a CSR 82BBG protein of the disclosure comprises or consists of the amino acid sequence of (CD8 signal peptide, CD2 extra cellular domain (D111H), IL2RB transmembrane domain, IL2RB intracellular domain #1, IL2RG intracellular domain #2):

(SEQ ID NO: 51)
MALPVTALLLPLALLLHAARPKEITNALETWGALGQDINLDIPSFQMSDD
IDDIKWEKTSDKKKIAQFRKEKETFKEKDTYKLFKNGTLKIKHLKTDDQD
IYKVSIYHTKGKNVLEKIFDLKIQERVSKPKISWTCINTTLTCEVMNGTD
PELNLYQDGKHLKLSQRVITHKWTTSLSAKFKCTAGNKVSKESSVEPVSC
PEKGLDIPWLGHLLVGLSGAFGFIILVYLLINCRNTGPWLKKVLKCNTPD
PSKFFSQLSSEHGGDVQKWLSSPFPSSSFSPGGLAPEISPLEVLERDKVT
QLLLQQDKVPEPASLSSNHSLTSCFTNQGYFFFHLPDALEIEACQVYFTY
DPYSEEDPDEGVAGAPTGSSPQPLQPLSGEDDAYCTFPSRDDLLLFSPSL
LGGPSPPSTAPGGSGAGEERMPPSLQERVPRDWDPQPLGPPTPGVPDLVD
FQPPPELVLREAGEEVPDAGPREGVSFPWSRPPGQGEFRALNARLPLNTD
AYLSLQELQGQDPTHLVERTMPRIPTLKNLEDLVTEYHGNFSAWSGVSKG
LAESLQPDYSERLCLVSEIPPKGGALGEGPGASPCNQHSPYWAPPCYTLK
PET

[0377] An exemplary nucleotide sequence encoding a CSR 82BBG protein of the disclosure comprises or consists of the amino acid sequence of (CD8 signal peptide, CD2 extra cellular domain (D111H), IL2RB transmembrane domain, IL2RB intracellular domain #1, IL2RG intracellular domain #2):

(SEQ ID NO: 204)
ATGGCTCTGCCTGTGACAGCTCTGCTGCTGCCTCTGGCTCTGCTTCTGCA
TGCCGCCAGACCTAAAGAGATCACAAACGCCCTGGAAACCTGGGGAGCCC
TCGGCCAGGATATTAACCTGGACATCCCCAGCTTCCAGATGAGCGACGAC
ATCGATGACATCAAGTGGGAGAAAACCAGCGACAAGAAGAAGATCGCCCA
GTTCCGGAAAGAGAAAGAGACATTCAAAGAGAAGGACACCTACAAGCTGT
TCAAGAACGGCACCCTGAAGATCAAGCACCTGAAAACCGACGACCAGGAC
ATCTATAAGGTGTCCATCTACCACACCAAGGGCAAGAACGTGCTGGAAAA
GATCTTCGACCTCAAGATCCAAGAGCGGGTGTCCAAGCCTAAGATCAGCT
GGACCTGCATCAACACCACACTGACCTGCGAAGTGATGAACGGCACAGAC
CCCGAGCTGAACCTGTACCAGGATGGCAAACACCTGAAGCTGAGCCAGCG
CGTGATCACCCACAAGTGGACAACAAGCCTGAGCGCCAAGTTCAAGTGCA
CCGCCGGAAACAAAGTGTCCAAAGAAAGCAGCGTGGAACCCGTGTCTTGC
CCCGAGAAAGGCCTGGACATTCCTTGGCTGGGACATCTGCTCGTGGGACT
GTCTGGCGCCTTCGGCTTTATCATCCTGGTGTACCTGCTGATCAACTGCC
GGAACACAGGCCCCTGGCTGAAGAAAGTGCTGAAGTGCAACACCCCTGAT
CCGAGCAAGTTCTTTAGCCAGCTGAGCAGCGAGCATGGCGGCGACGTTCA
GAAATGGCTGTCTAGCCCATTTCCTAGCAGCAGCTTCAGCCCTGGTGGAC
TGGCCCCTGAGATTAGCCCTCTGGAAGTGCTGGAACGGGACAAAGTGACC
CAGCTGCTCCTGCAGCAGGATAAGGTGCCAGAACCTGCCAGCCTGTCCAG
CAATCACAGCCTGACCAGCTGCTTTACCAACCAGGGCTACTTCTTCTTCC
ATCTGCCTGACGCTCTGGAAATCGAGGCCTGCCAGGTGTACTTCACCTAC
GATCCCTACAGCGAAGAGGACCCCGATGAAGGTGTTGCCGGTGCTCCTAC
CGGAAGCTCTCCTCAACCTCTGCAACCACTGAGCGGCGAGGATGACGCCT
ACTGCACATTCCCCAGCAGAGATGACCTGCTGCTGTTCAGCCCTTCTCTG
CTCGGTGGACCTTCTCCACCTTCTACAGCACCTGGCGGATCTGGCGCAGG
CGAGGAAAGAATGCCTCCTAGCCTGCAAGAGAGAGTGCCCAGAGACTGGG
ATCCTCAGCCTCTCGGACCTCCTACACCAGGCGTGCCAGACCTGGTGGAT
TTTCAGCCTCCTCCAGAGCTGGTGCTGAGAGAAGCTGGCGAAGAAGTGCC
AGACGCCGGACCTAGAGAGGGCGTTAGCTTTCCTTGGAGCAGACCTCCTG
GACAGGGCGAGTTCAGAGCCCTGAATGCTAGACTGCCCCTGAACACCGAT
GCCTACCTGTCTCTGCAAGAGCTGCAGGGACAAGACCCCACACATCTGGT
GGAACGGAGCATGCCTAGAATCCCCACACTGAAGAACCTGGAAGATCTGG
TCACCGAGTACCACGGCAACTTCAGTGCTTGGAGTGGCGTGTCAAAAGGA
CTGGCCGAGAGCCTGCAGCCTGACTACTCTGAGAGACTGTGCCTGGTGTC
TGAGATCCCTCCTAAAGGCGGAGCCCTTGGAGAAGGACCTGGCGCCTCTC
CATGTAACCAGCACAGCCCTTATTGGGCCCCTCCTTGCTACACTCTGAAG
CCCGAGACA

[0378] An exemplary protein sequence encoding a CSR 82BBGz protein of the disclosure comprises or consists of the amino acid sequence of (CD8 signal peptide, CD2 extra cellular domain (D111H), IL2RB transmembrane domain, IL2RB intracellular domain #1, IL2RG intracellular domain #2, CD3z intracellular domain #3):

(SEQ ID NO: 52)
MALPVTALLLPLALLLHAARPKEITNALETWGALGQDINLDIPSFQMSDD
IDDIKWEKTSDKKKIAQFRKEKETFKEKDTYKLFKNGTLKIKHLKTDDQD
IYKVSIYHTKGKNVLEKIFDLKIQERVSKPKISWTCINTTLTCEVMNGTD
PELNLYQDGKHLKLSQRVITHKWTTSLSAKFKCTAGNKVSKESSVEPVSC
PEKGLDIPWLGHLLVGLSGAFGFIILVYLLINCRNTGPWLKKVLKCNTPD
PSKFFSQLSSEHGGDVQKWLSSPFPSSSFSPGGLAPEISPLEVLERDKVT
QLLLQQDKVPEPASLSSNHSLTSCFTNQGYFFFHLPDALEIEACQVYFTY
DPYSEEDPDEGVAGAPTGSSPQPLQPLSGEDDAYCTFPSRDDLLLFSPSL
LGGPSPPSTAPGGSGAGEERMPPSLQERVPRDWDPQPLGPPTPGVPDLVD
FQPPPELVLREAGEEVPDAGPREGVSFPWSRPPGQGEFRALNARLPLNTD
AYLSLQELQGQDPTHLVERTMPRIPTLKNLEDLVTEYHGNFSAWSGVSKG
LAESLQPDYSERLCLVSEIPPKGGALGEGPGASPCNQHSPYWAPPCYTLK
PET

[symbol]

[symbol]

[symbol]

[symbol]

[symbol]

[0379] An exemplary nucleotide sequence encoding a CSR 82BBGz protein of the disclosure comprises or consists of the amino acid sequence of (CD8 signal peptide, CD2 extra cellular domain (D111H), IL2RB transmembrane domain, IL2RB intracellular domain #1, IL2RG intracellular domain #2, CD3z intracellular domain #3):

(SEQ ID NO: 205)
ATGGCTCTGCCTGTGACAGCTCTGCTGCTGCCTCTGGCTCTGCTTCTGCA
TGCCGCCAGACCTAAAGAGATCACAAACGCCCTGGAAACCTGGGGAGCCC
TCGGCCAGGATATTAACCTGGACATCCCCAGCTTCCAGATGAGCGACGAC
ATCGATGACATCAAGTGGGAGAAAACCAGCGACAAGAAGAAGATCGCCCA
GTTCCGGAAAGAGAAAGAGACATTCAAAGAGAAGGACACCTACAAGCTGT
TCAAGAACGGCACCCTGAAGATCAAGCACCTGAAAACCGACGACCAGGAC
ATCTATAAGGTGTCCATCTACCACACCAAGGGCAAGAACGTGCTGGAAAA
GATCTTCGACCTCAAGATCCAAGAGCGGGTGTCCAAGCCTAAGATCAGCT
GGACCTGCATCAACACCACACTGACCTGCGAAGTGATGAACGGCACAGAC
CCCGAGCTGAACCTGTACCAGGATGGCAAACACCTGAAGCTGAGCCAGCG
CGTGATCACCCACAAGTGGACAACAAGCCTGAGCGCCAAGTTCAAGTGCA
CCGCCGGAAACAAAGTGTCCAAAGAAAGCAGCGTGGAACCCGTGTCTTGC
CCCGAGAAAGGCCTGGACATTCCTTGGCTGGGACATCTGCTCGTGGGACT
GTCTGGCGCCTTCGGCTTTATCATCCTGGTGTACCTGCTGATCAACTGCC
GGAACACAGGCCCCTGGCTGAAGAAAGTGCTGAAGTGCAACACCCCTGAT
CCGAGCAAGTTCTTTAGCCAGCTGAGCAGCGAGCATGGCGGCGACGTTCA
GAAATGGCTGTCTAGCCCATTTCCTAGCAGCAGCTTCAGCCCTGGTGGAC
TGGCCCCTGAGATTAGCCCTCTGGAAGTGCTGGAACGGGACAAAGTGACC
CAGCTGCTCCTGCAGCAGGATAAGGTGCCAGAACCTGCCAGCCTGTCCAG
CAATCACAGCCTGACCAGCTGCTTTACCAACCAGGGCTACTTCTTCTTCC
ATCTGCCTGACGCTCTGGAAATCGAGGCCTGCCAGGTGTACTTCACCTAC
GATCCCTACAGCGAAGAGGACCCCGATGAAGGTGTTGCCGGTGCTCCTAC
CGGAAGCTCTCCTCAACCTCTGCAACCACTGAGCGGCGAGGATGACGCCT
ACTGCACATTCCCCAGCAGAGATGACCTGCTGCTGTTCAGCCCTTCTCTG
CTCGGTGGACCTTCTCCACCTTCTACAGCACCTGGCGGATCTGGCGCAGG
CGAGGAAAGAATGCCTCCTAGCCTGCAAGAGAGAGTGCCCAGAGACTGGG
ATCCTCAGCCTCTCGGACCTCCTACACCAGGCGTGCCAGACCTGGTGGAT
TTTCAGCCTCCTCCAGAGCTGGTGCTGAGAGAAGCTGGCGAAGAAGTGCC
AGACGCCGGACCTAGAGAGGGCGTTAGCTTTCCTTGGAGCAGACCTCCTG
GACAGGGCGAGTTCAGAGCCCTGAATGCTAGACTGCCCCTGAACACCGAT
GCCTACCTGTCTCTGCAAGAGCTGCAGGGACAAGACCCCACACATCTGGT
GGAACGGAGCATGCCTAGAATCCCCACACTGAAGAACCTGGAAGATCTGG
TCACCGAGTACCACGGCAACTTCAGTGCTTGGAGTGGCGTGTCAAAAGGA
CTGGCCGAGAGCCTGCAGCCTGACTACTCTGAGAGACTGTGCCTGGTGTC
TGAGATCCCTCCTAAAGGCGGAGCCCTTGGAGAAGGACCTGGCGCCTCTC
CATGTAACCAGCACAGCCCTTATTGGGCCCCTCCTTGCTACACTCTGAAG
CCCGAGACA

[symbol]

[symbol]

[symbol]

[symbol]

[symbol]

[symbol]

[symbol]

[symbol]

[symbol]

[symbol]

[symbol]

[symbol]

[0380] An exemplary protein sequence encoding a CSR 822BG protein of the disclosure comprises or consists of the amino acid sequence of (CD8 signal peptide, CD2 extra cellular domain (D111H), CD2 transmembrane domain, IL2RB intracellular domain #1, IL2RG intracellular domain #2):

(SEQ ID NO: 53)
MALPVTALLLPLALLLHAARPKEITNALETWGALGQDINLDIPSFQMSDD
IDDIKWEKTSDKKKIAQFRKEKETFKEKDTYKLFKNGTLKIKHLKTDDQD
IYKVSIYHTKGKNVLEKIFDLKIQERVSKPKISWTCINTTLTCEVMNGTD
PELNLYQDGKHLKLSQRVITHKWTTSLSAKFKCTAGNKVSKESSVEPVSC
PEKGLDIYLIIGICGGGSLLMVFVALLVFYITNCRNTGPWLKKVLKCNTP
DPSKFFSQLSSEHGGDVQKWLSSPFPSSSFSPGGLAPEISPLEVLERDKV
TQLLLQQDKVPEPASLSSNHSLTSCFTNQGYFFFHLPDALEIEACQVYFT
YDPYSEEDPDEGVAGAPTGSSPQPLQPLSGEDDAYCTFPSRDDLLLFSPS
LLGGPSPPSTAPGGSGAGEERMPPSLQERVPRDWDPQPLGPPTPGVPDLV
DFQPPPELVLREAGEEVPDAGPREGVSFPWSRPPGQGEFRALNARLPLNT
DAYLSLQELQGQDPTHLVERTMPRIPTLKNLEDLVTEYHGNFSAWSGVSK
GLAESLQPDYSERLCLVSEIPPKGGALGEGPGASPCNQHSPYWAPPCYTL
KPET

[0381] An exemplary nucleotide sequence encoding a CSR 822BG protein of the disclosure comprises or consists of the amino acid sequence of (CD8 signal peptide, CD2 extra cellular domain (D111H), CD2 transmembrane domain, IL2RB intracellular domain #1, IL2RG intracellular domain #2):

(SEQ ID NO: 206)
ATGGCTCTGCCTGTGACAGCTCTGCTGCTGCCTCTGGCTCTGCTTCTGCA
TGCCGCCAGACCTAAAGAGATCACAAACGCCCTGGAAACCTGGGGAGCCC
TCGGCCAGGATATTAACCTGGACATCCCCAGCTTCCAGATGAGCGACGAC
ATCGATGACATCAAGTGGGAGAAAACCAGCGACAAGAAGAAGATCGCCCA
GTTCCGGAAAGAGAAAGAGACATTCAAAGAGAAGGACACCTACAAGCTGT
TCAAGAACGGCACCCTGAAGATCAAGCACCTGAAAACCGACGACCAGGAC
ATCTATAAGGTGTCCATCTACCACACCAAGGGCAAGAACGTGCTGGAAAA
GATCTTCGACCTCAAGATCCAAGAGCGGGTGTCCAAGCCTAAGATCAGCT
GGACCTGCATCAACACCACACTGACCTGCGAAGTGATGAACGGCACAGAC
CCCGAGCTGAACCTGTACCAGGATGGCAAACACCTGAAGCTGAGCCAGCG
CGTGATCACCCACAAGTGGACAACAAGCCTGAGCGCCAAGTTCAAGTGCA
CCGCCGGAAACAAAGTGTCCAAAGAAAGCAGCGTGGAACCCGTGTCTTGC
CCCGAGAAAGGACTGGACATCTACCTGATCATCGGCATCTGTGGCGGCGG
AAGCCTGCTGATGGTGTTTGTTGCCCTGCTGGTGTTCTACATCACCAACT
GCAGAAACACAGGCCCCTGGCTGAAGAAAGTGCTGAAGTGCAACACCCCT
GATCCGAGCAAGTTCTTTAGCCAGCTGAGCAGCGAGCATGGCGGCGACGT
TCAGAAATGGCTGTCTAGCCCATTTCCTAGCAGCAGCTTCAGCCCTGGTG
GACTGGCCCCTGAGATTAGCCCTCTGGAAGTGCTGGAACGGGACAAAGTG
ACCCAGCTGCTCCTGCAGCAGGATAAGGTGCCAGAACCTGCCAGCCTGTC
CAGCAATCACAGCCTGACCAGCTGCTTTACCAACCAGGGCTACTTCTTCT
TCCATCTGCCTGACGCTCTGGAAATCGAGGCCTGCCAGGTGTACTTCACC
TACGATCCCTACAGCGAAGAGGACCCCGATGAAGGTGTTGCCGGTGCTCC
TACCGGAAGCTCTCCTCAACCTCTGCAACCACTGAGCGGCGAGGATGACG
CCTACTGCACATTCCCCAGCAGAGATGACCTGCTGCTGTTCAGCCCTTCT
CTGCTCGGTGGACCTTCTCCACCTTCTACAGCACCTGGCGGATCTGGCGC
AGGCGAGGAAAGAATGCCTCCTAGCCTGCAAGAGAGAGTGCCCAGAGACT
GGGATCCTCAGCCTCTCGGACCTCCTACACCAGGCGTGCCAGACCTGGTG
GATTTTCAGCCTCCTCCAGAGCTGGTGCTGAGAGAAGCTGGCGAAGAAGT
GCCAGACGCCGGACCTAGAGAGGGCGTTAGCTTTCCTTGGAGCAGACCTC
CTGGACAGGGCGAGTTCAGAGCCCTGAATGCTAGACTGCCCCTGAACACC
GATGCCTACCTGTCTCTGCAAGAGCTGCAGGGACAAGACCCCACACATCT
GGTGGAACGGACCATGCCTAGAATCCCCACACTGAAGAACCTGGAAGATC
TGGTCACCGAGTACCACGGCAACTTCAGTGCTTGGAGTGGCGTGTCAAAA
GGCCTGGCCGAAAGCCTGCAGCCTGACTACTCTGAGAGACTGTGCCTGGT
GTCTGAGATCCCTCCTAAAGGCGGAGCCCTTGGAGAAGGACCTGGCGCCT
CTCCATGTAACCAGCACAGCCCTTATTGGGCCCCTCCTTGCTACACTCTG
AAGCCCGAGACA

[0382] An exemplary protein sequence encoding a CSR 822BGz protein of the disclosure comprises or consists of the amino acid sequence of (CD8 signal peptide, CD2 extra cellular domain (D111H), CD2 transmembrane domain, IL2RB intracellular domain #1, IL2RG intracellular domain #2, CD3z intracellular domain #3):

(SEQ ID NO: 54)
MALPVTALLLPLALLLHAARPKEITNALETWGALGQDINLDIPSFQMSDD
IDDIKWEKTSDKKKIAQFRKEKETFKEKDTYKLFKNGTLKIKHLKTDDQD
IYKVSIYHTKGKNVLEKIFDLKIQERVSKPKISWTCINTTLTCEVMNGTD
PELNLYQDGKHLKLSQRVITHKWTTSLSAKFKCTAGNKVSKESSVEPVSC
PEKGLDIYLIIGICGGGSLLMVFVALLVFYITNCRNTGPWLKKVLKCNTP
DPSKFFSQLSSEHGGDVQKWLSSPFPSSSFSPGGLAPEISPLEVLERDKV
TQLLLQQDKVPEPASLSSNHSLTSCFTNQGYFFFHLPDALEIEACQVYFT
YDPYSEEDPDEGVAGAPTGSSPQPLQPLSGEDDAYCTFPSRDDLLLFSPS
LLGGPSPPSTAPGGSGAGEERMPPSLQERVPRDWDPQPLGPPTPGVPDLV
DFQPPPELVLREAGEEVPDAGPREGVSFPWSRPPGQGEFRALNARLPLNT
DAYLSLQELQGQDPTHLVERTMPRIPTLKNLEDLVTEYHGNFSAWSGVSK
GLAESLQPDYSERLCLVSEIPPKGGALGEGPGASPCNQHSPYWAPPCYTL
KPET

[symbol]

[symbol]

[symbol]

[symbol]

[symbol]

[0383] An exemplary nucleotide sequence encoding a CSR 822BGz protein of the disclosure comprises or consists of the amino acid sequence of (CD8 signal peptide, CD2 extra cellular domain (D111H), CD2 transmembrane domain, IL2RB intracellular domain #1, IL2RG intracellular domain #2, CD3z intracellular domain #3):

(SEQ ID NO: 207)
ATGGCTCTGCCTGTGACAGCTCTGCTGCTGCCTCTGGCTCTGCTTCTGCA
TGCCGCCAGACCTAAAGAGATCACAAACGCCCTGGAAACCTGGGGAGCCC
TCGGCCAGGATATTAACCTGGACATCCCCAGCTTCCAGATGAGCGACGAC
ATCGATGACATCAAGTGGGAGAAAACCAGCGACAAGAAGAAGATCGCCCA
GTTCCGGAAAGAGAAAGAGACATTCAAAGAGAAGGACACCTACAAGCTGT
TCAAGAACGGCACCCTGAAGATCAAGCACCTGAAAACCGACGACCAGGAC
ATCTATAAGGTGTCCATCTACCACACCAAGGGCAAGAACGTGCTGGAAAA
GATCTTCGACCTCAAGATCCAAGAGCGGGTGTCCAAGCCTAAGATCAGCT
GGACCTGCATCAACACCACACTGACCTGCGAAGTGATGAACGGCACAGAC
CCCGAGCTGAACCTGTACCAGGATGGCAAACACCTGAAGCTGAGCCAGCG
CGTGATCACCCACAAGTGGACAACAAGCCTGAGCGCCAAGTTCAAGTGCA
CCGCCGGAAACAAAGTGTCCAAAGAAAGCAGCGTGGAACCCGTGTCTTGC
CCCGAGAAAGGACTGGACATCTACCTGATCATCGGCATCTGTGGCGGCGG
AAGCCTGCTGATGGTGTTTGTTGCCCTGCTGGTGTTCTACATCACCAACT
GCAGAAACACAGGCCCCTGGCTGAAGAAAGTGCTGAAGTGCAACACCCCT
GATCCGAGCAAGTTCTTTAGCCAGCTGAGCAGCGAGCATGGCGGCGACGT
TCAGAAATGGCTGTCTAGCCCATTTCCTAGCAGCAGCTTCAGCCCTGGTG
GACTGGCCCCTGAGATTAGCCCTCTGGAAGTGCTGGAACGGGACAAAGTG
ACCCAGCTGCTCCTGCAGCAGGATAAGGTGCCAGAACCTGCCAGCCTGTC
CAGCAATCACAGCCTGACCAGCTGCTTTACCAACCAGGGCTACTTCTTCT
TCCATCTGCCTGACGCTCTGGAAATCGAGGCCTGCCAGGTGTACTTCACC
TACGATCCCTACAGCGAAGAGGACCCCGATGAAGGTGTTGCCGGTGCTCC
TACCGGAAGCTCTCCTCAACCTCTGCAACCACTGAGCGGCGAGGATGACG
CCTACTGCACATTCCCCAGCAGAGATGACCTGCTGCTGTTCAGCCCTTCT
CTGCTCGGTGGACCTTCTCCACCTTCTACAGCACCTGGCGGATCTGGCGC
AGGCGAGGAAAGAATGCCTCCTAGCCTGCAAGAGAGAGTGCCCAGAGACT
GGGATCCTCAGCCTCTCGGACCTCCTACACCAGGCGTGCCAGACCTGGTG
GATTTTCAGCCTCCTCCAGAGCTGGTGCTGAGAGAAGCTGGCGAAGAAGT
GCCAGACGCCGGACCTAGAGAGGGCGTTAGCTTTCCTTGGAGCAGACCTC
CTGGACAGGGCGAGTTCAGAGCCCTGAATGCTAGACTGCCCCTGAACACC
GATGCCTACCTGTCTCTGCAAGAGCTGCAGGGACAAGACCCCACACATCT
GGTGGAACGGACCATGCCTAGAATCCCCACACTGAAGAACCTGGAAGATC
TGGTCACCGAGTACCACGGCAACTTCAGTGCTTGGAGTGGCGTGTCAAAA
GGCCTGGCCGAAAGCCTGCAGCCTGACTACTCTGAGAGACTGTGCCTGGT
GTCTGAGATCCCTCCTAAAGGCGGAGCCCTTGGAGAAGGACCTGGCGCCT
CTCCATGTAACCAGCACAGCCCTTATTGGGCCCCTCCTTGCTACACTCTG
AAGCCCGAGACA

[symbol]

[symbol]

[symbol]

[symbol]

[symbol]

[symbol]

[symbol]

[symbol]

[symbol]

[symbol]

[symbol]

[symbol]

[0384] An exemplary protein sequence encoding a CSR 82GGB protein of the disclosure comprises or consists of the amino acid sequence of (CD8 signal peptide, CD2 extra cellular domain (D111H), IL2RG transmembrane domain, IL2RG intracellular domain #1, IL2RB intracellular domain #2):

(SEQ ID NO: 55)
MALPVTALLLPLALLLHAARPKEITNALETWGALGQDINLDIPSFQMSDD
IDDIKWEKTSDKKKIAQFRKEKETFKEKDTYKLFKNGTLKIKHLKTDDQD
IYKVSIYHTKGKNVLEKIFDLKIQERVSKPKISWTCINTTLTCEVMNGTD
PELNLYQDGKHLKLSQRVITHKWTTSLSAKFKCTAGNKVSKESSVEPVSC
PEKGLDAVVISVGSMGLIISLLCVYFWLERTMPRIPTLKNLEDLVTEYHG
NFSAWSGVSKGLAESLQPDYSERLCLVSEIPPKGGALGEGPGASPCNQHS
PYWAPPCYTLKPETNCRNTGPWLKKVLKCNTPDPSKFFSQLSSEHGGDVQ
KWLSSPFPSSSFSPGGLAPEISPLEVLERDKVTQLLLQQDKVPEPASLSS
NHSLTSCFTNQGYFFFHLPDALEIEACQVYFTYDPYSEEDPDEGVAGAPT
GSSPQPLQPLSGEDDAYCTFPSRDDLLLFSPSLLGGPSPPSTAPGGSGAG
EERMPPSLQERVPRDWDPQPLGPPTPGVPDLVDFQPPPELVLREAGEEVP
DAGPREGVSFPWSRPPGQGEFRALNARLPLNTDAYLSLQELQGQDPTHLV

[0385] An exemplary nucleotide sequence encoding a CSR 82GGB protein of the disclosure comprises or consists of the amino acid sequence of (CD8 signal peptide, CD2 extra cellular domain (D111H), IL2RG transmembrane domain, IL2RG intracellular domain #1, IL2RB intracellular domain #2):

(SEQ ID NO: 208)
ATGGCTCTGCCTGTGACAGCTCTGCTGCTGCCTCTGGCTCTGCTTCTGCA
TGCCGCCAGACCTAAAGAGATCACAAACGCCCTGGAAACCTGGGGAGCCC
TCGGCCAGGATATTAACCTGGACATCCCCAGCTTCCAGATGAGCGACGAC
ATCGATGACATCAAGTGGGAGAAAACCAGCGACAAGAAGAAGATCGCCCA
GTTCCGGAAAGAGAAAGAGACATTCAAAGAGAAGGACACCTACAAGCTGT
TCAAGAACGGCACCCTGAAGATCAAGCACCTGAAAACCGACGACCAGGAC
ATCTATAAGGTGTCCATCTACCACACCAAGGGCAAGAACGTGCTGGAAAA
GATCTTCGACCTCAAGATCCAAGAGCGGGTGTCCAAGCCTAAGATCAGCT
GGACCTGCATCAACACCACACTGACCTGCGAAGTGATGAACGGCACAGAC
CCCGAGCTGAACCTGTACCAGGATGGCAAACACCTGAAGCTGAGCCAGCG
CGTGATCACCCACAAGTGGACAACAAGCCTGAGCGCCAAGTTCAAGTGCA
CCGCCGGAAACAAAGTGTCCAAAGAAAGCAGCGTGGAACCCGTGTCTTGC
CCCGAGAAAGGACTGGATGCCGTGGTCATCAGCGTGGGCTCTATGGGCCT
GATCATCAGCCTGCTGTGCGTGTACTTCTGGCTGGAACGGACCATGCCTC
GGATCCCCACACTGAAGAACCTGGAAGATCTGGTCACCGAGTACCACGGC
AACTTCTCTGCTTGGAGTGGCGTGTCAAAAGGCCTGGCCGAAAGCCTGCA
GCCTGACTACTCTGAGAGACTGTGCCTGGTGTCTGAGATCCCTCCTAAAG
GCGGAGCCCTTGGAGAAGGACCTGGCGCCTCTCCATGTAACCAGCACAGC
CCTTATTGGGCCCCTCCTTGCTACACTCTGAAGCCCGAGACAAACTGCCG
GAACACAGGCCCCTGGCTGAAGAAAGTGCTGAAGTGCAACACCCCTGATC
CGAGCAAGTTCTTTAGCCAGCTGAGCAGCGAGCATGGCGGCGACGTTCAG
AAATGGCTGTCTAGCCCATTTCCTAGCAGCAGCTTCAGCCCTGGTGGACT
GGCCCCTGAGATTAGCCCTCTGGAAGTGCTCGAGCGGGACAAAGTGACAC
AGCTGCTCCTCCAGCAGGACAAGGTGCCAGAACCTGCCAGCCTGTCCAGC
AATCACAGCCTGACCAGCTGCTTTACCAACCAGGGCTACTTCTTCTTCCA
TCTGCCTGACGCTCTGGAAATCGAGGCCTGCCAGGTGTACTTCACCTACG
ATCCCTACAGCGAAGAGGACCCCGATGAAGGTGTTGCCGGTGCTCCTACC
GGAAGCTCTCCTCAACCTCTGCAACCACTGAGCGGCGAGGATGACGCCTA
CTGCACATTCCCCAGCAGAGATGACCTGCTGCTGTTCAGCCCTAGCCTGC
TCGGAGGACCTTCTCCACCATCTACAGCTCCAGGTGGAAGCGGAGCCGGC
GAGGAAAGAATGCCTCCAAGCCTGCAAGAGAGAGTGCCCAGAGACTGGGA
TCCTCAGCCTCTCGGACCTCCTACACCAGGCGTGCCAGACCTGGTGGATT
TTCAGCCTCCTCCAGAGCTGGTGCTGAGAGAAGCTGGCGAAGAAGTGCCA
GACGCCGGACCTAGAGAGGGCGTTAGCTTTCCTTGGAGCAGACCTCCTGG
ACAGGGCGAGTTCAGAGCCCTGAATGCTAGACTGCCCCTGAACACCGATG
CCTACCTGTCTCTGCAAGAGCTGCAGGGACAAGACCCCACACACCTGGTG

[0386] An exemplary protein sequence encoding a CSR 82GGBz protein of the disclosure comprises or consists of the amino acid sequence of (CD8 signal peptide, CD2 extra cellular domain (D111H), IL2RG transmembrane domain, IL2RG intracellular domain #1, IL2RB intracellular domain #2, CD3z intracellular domain #3):

(SEQ ID NO: 56)
MALPVTALLLPLALLLHAARPKEITNALETWGALGQDINLDIPSFQMSDD
IDDIKWEKTSDKKKIAQFRKEKETFKEKDTYKLFKNGTLKIKHLKTDDQD
IYKVSIYHTKGKNVLEKIFDLKIQERVSKPKISWTCINTTLTCEVMNGTD
PELNLYQDGKHLKLSQRVITHKWTTSLSAKFKCTAGNKVSKESSVEPVSC
PEKGLDAVVISVGSMGLIISLLCVYFWLERTMPRIPTLKNLEDLVTEYHG
NFSAWSGVSKGLAESLQPDYSERLCLVSEIPPKGGALGEGPGASPCNQHS
PYWAPPCYTLKPETNCRNTGPWLKKVLKCNTPDPSKFFSQLSSEHGGDVQ
KWLSSPFPSSSFSPGGLAPEISPLEVLERDKVTQLLLQQDKVPEPASLSS
NHSLTSCFTNQGYFFFHLPDALEIEACQVYFTYDPYSEEDPDEGVAGAPT
GSSPQPLQPLSGEDDAYCTFPSRDDLLLFSPSLLGGPSPPSTAPGGSGAG
EERMPPSLQERVPRDWDPQPLGPPTPGVPDLVDFQPPPELVLREAGEEVP
DAGPREGVSFPWSRPPGQGEFRALNARLPLNTDAYLSLQELQGQDPTHLV

[symbol]

[symbol]

[symbol]

[symbol]

[0387] An exemplary nucleotide sequence encoding a CSR 82GGBz protein of the disclosure comprises or consists of the amino acid sequence of (CD8 signal peptide, CD2 extra cellular domain (D111H), IL2RG transmembrane domain, IL2RG intracellular domain #1, IL2RB intracellular domain #2, CD3z intracellular domain #3):

(SEQ ID NO: 209)
ATGGCTCTGCCTGTGACAGCTCTGCTGCTGCCTCTGGCTCTGCTTCTGCA
TGCCGCCAGACCTAAAGAGATCACAAACGCCCTGGAAACCTGGGGAGCCC
TCGGCCAGGATATTAACCTGGACATCCCCAGCTTCCAGATGAGCGACGAC
ATCGATGACATCAAGTGGGAGAAAACCAGCGACAAGAAGAAGATCGCCCA
GTTCCGGAAAGAGAAAGAGACATTCAAAGAGAAGGACACCTACAAGCTGT
TCAAGAACGGCACCCTGAAGATCAAGCACCTGAAAACCGACGACCAGGAC
ATCTATAAGGTGTCCATCTACCACACCAAGGGCAAGAACGTGCTGGAAAA
GATCTTCGACCTCAAGATCCAAGAGCGGGTGTCCAAGCCTAAGATCAGCT
GGACCTGCATCAACACCACACTGACCTGCGAAGTGATGAACGGCACAGAC
CCCGAGCTGAACCTGTACCAGGATGGCAAACACCTGAAGCTGAGCCAGCG
CGTGATCACCCACAAGTGGACAACAAGCCTGAGCGCCAAGTTCAAGTGCA
CCGCCGGAAACAAAGTGTCCAAAGAAAGCAGCGTGGAACCCGTGTCTTGC
CCCGAGAAAGGACTGGATGCCGTGGTCATCAGCGTGGGCTCTATGGGCCT
GATCATCAGCCTGCTGTGCGTGTACTTCTGGCTGGAACGGACCATGCCTC
GGATCCCCACACTGAAGAACCTGGAAGATCTGGTCACCGAGTACCACGGC
AACTTCTCTGCTTGGAGTGGCGTGTCAAAAGGCCTGGCCGAAAGCCTGCA
GCCTGACTACTCTGAGAGACTGTGCCTGGTGTCTGAGATCCCTCCTAAAG
GCGGAGCCCTTGGAGAAGGACCTGGCGCCTCTCCATGTAACCAGCACAGC
CCTTATTGGGCCCCTCCTTGCTACACTCTGAAGCCCGAGACAAACTGCCG
GAACACAGGCCCCTGGCTGAAGAAAGTGCTGAAGTGCAACACCCCTGATC
CGAGCAAGTTCTTTAGCCAGCTGAGCAGCGAGCATGGCGGCGACGTTCAG
AAATGGCTGTCTAGCCCATTTCCTAGCAGCAGCTTCAGCCCTGGTGGACT
GGCCCCTGAGATTAGCCCTCTGGAAGTGCTCGAGCGGGACAAAGTGACAC
AGCTGCTCCTCCAGCAGGACAAGGTGCCAGAACCTGCCAGCCTGTCCAGC
AATCACAGCCTGACCAGCTGCTTTACCAACCAGGGCTACTTCTTCTTCCA
TCTGCCTGACGCTCTGGAAATCGAGGCCTGCCAGGTGTACTTCACCTACG
ATCCCTACAGCGAAGAGGACCCCGATGAAGGTGTTGCCGGTGCTCCTACC
GGAAGCTCTCCTCAACCTCTGCAACCACTGAGCGGCGAGGATGACGCCTA
CTGCACATTCCCCAGCAGAGATGACCTGCTGCTGTTCAGCCCTAGCCTGC
TCGGAGGACCTTCTCCACCATCTACAGCTCCAGGTGGAAGCGGAGCCGGC
GAGGAAAGAATGCCTCCAAGCCTGCAAGAGAGAGTGCCCAGAGACTGGGA
TCCTCAGCCTCTCGGACCTCCTACACCAGGCGTGCCAGACCTGGTGGATT
TTCAGCCTCCTCCAGAGCTGGTGCTGAGAGAAGCTGGCGAAGAAGTGCCA
GACGCCGGACCTAGAGAGGGCGTTAGCTTTCCTTGGAGCAGACCTCCTGG
ACAGGGCGAGTTCAGAGCCCTGAATGCTAGACTGCCCCTGAACACCGATG
CCTACCTGTCTCTGCAAGAGCTGCAGGGACAAGACCCCACACACCTCGTC

[symbol]

[symbol]

[symbol]

[symbol]

[symbol]

[symbol]

[symbol]

[symbol]

[symbol]

[symbol]

[symbol]

[0388] An exemplary protein sequence encoding a CSR 822 GB protein of the disclosure comprises or consists of the amino acid sequence of (CD8 signal peptide, CD2 extra cellular domain (D111H), CD2 transmembrane domain, IL2RG intracellular domain #1, IL2RB intracellular domain #2):

(SEQ ID NO: 57)
MALPVTALLLPLALLLHAARPKEITNALETWGALGQDINLDIPSFQMSDD
IDDIKWEKTSDKKKIAQFRKEKETFKEKDTYKLFKNGTLKIKHLKTDDQD
IYKVSIYHTKGKNVLEKIFDLKIQERVSKPKISWTCINTTLTCEVMNGTD
PELNLYQDGKHLKLSQRVITHKWTTSLSAKFKCTAGNKVSKESSVEPVSC
PEKGLDIYLIIGICGGGSLLMVFVALLVFYITERTMPRIPTLKNLEDLVT
EYHGNFSAWSGVSKGLAESLQPDYSERLCLVSEIPPKGGALGEGPGASPC
NQHSPYWAPPCYTLKPETNCRNTGPWLKKVLKCNTPDPSKFFSQLSSEHG
GDVQKWLSSPFPSSSFSPGGLAPEISPLEVLERDKVTQLLLQQDKVPEPA
SLSSNHSLTSCFTNQGYFFFHLPDALEIEACQVYFTYDPYSEEDPDEGVA
GAPTGSSPQPLQPLSGEDDAYCTFPSRDDLLLFSPSLLGGPSPPSTAPGG
SGAGEERMPPSLQERVPRDWDPQPLGPPTPGVPDLVDFQPPPELVLREAG
EEVPDAGPREGVSFPWSRPPGQGEFRALNARLPLNTDAYLSLQELQGQDP
THLV

[0389] An exemplary nucleotide sequence encoding a CSR 822 GB protein of the disclosure comprises or consists of the amino acid sequence of (CD8 signal peptide, CD2 extra cellular domain (D111H), CD2 transmembrane domain, IL2RG intracellular domain #1, IL2RB intracellular domain #2):

(SEQ ID NO: 210)
ATGGCTCTGCCTGTGACAGCTCTGCTGCTGCCTCTGGCTCTGCTTCTGCA
TGCCGCCAGACCTAAAGAGATCACAAACGCCCTGGAAACCTGGGGAGCCC
TCGGCCAGGATATTAACCTGGACATCCCCAGCTTCCAGATGAGCGACGAC
ATCGATGACATCAAGTGGGAGAAAACCAGCGACAAGAAGAAGATCGCCCA
GTTCCGGAAAGAGAAAGAGACATTCAAAGAGAAGGACACCTACAAGCTGT
TCAAGAACGGCACCCTGAAGATCAAGCACCTGAAAACCGACGACCAGGAC
ATCTATAAGGTGTCCATCTACCACACCAAGGGCAAGAACGTGCTGGAAAA
GATCTTCGACCTCAAGATCCAAGAGCGGGTGTCCAAGCCTAAGATCAGCT
GGACCTGCATCAACACCACACTGACCTGCGAAGTGATGAACGGCACAGAC
CCCGAGCTGAACCTGTACCAGGATGGCAAACACCTGAAGCTGAGCCAGCG
CGTGATCACCCACAAGTGGACAACAAGCCTGAGCGCCAAGTTCAAGTGCA
CCGCCGGAAACAAAGTGTCCAAAGAAAGCAGCGTGGAACCCGTGTCTTGC
CCCGAGAAAGGACTGGACATCTACCTGATCATCGGCATCTGTGGCGGCGG
AAGCCTGCTGATGGTGTTTGTTGCCCTGCTGGTGTTCTACATCACCGAGC
GGACCATGCCTCGGATCCCCACACTGAAGAACCTGGAAGATCTGGTCACC
GAGTACCACGGCAACTTCTCTGCTTGGAGTGGCGTGTCAAAAGGCCTGGC
CGAAAGCCTGCAGCCTGACTACTCTGAGAGACTGTGCCTGGTGTCTGAGA
TCCCTCCTAAAGGCGGAGCCCTTGGAGAAGGACCTGGCGCCTCTCCATGT
AACCAGCACAGCCCTTATTGGGCCCCTCCTTGCTACACTCTGAAGCCCGA
GACAAACTGCCGGAACACAGGCCCCTGGCTGAAGAAAGTGCTGAAGTGCA
ACACCCCTGATCCGAGCAAGTTCTTTAGCCAGCTGAGCAGCGAGCATGGC
GGCGACGTTCAGAAATGGCTGTCTAGCCCATTTCCTAGCAGCAGCTTCAG
CCCTGGTGGACTGGCCCCTGAGATTAGCCCTCTGGAAGTGCTGGAACGGG
ACAAAGTGACCCAGCTGCTCCTGCAGCAGGATAAGGTGCCAGAACCTGCC
AGCCTGTCCAGCAATCACAGCCTGACCAGCTGCTTTACCAACCAGGGCTA
CTTCTTCTTCCATCTGCCTGACGCTCTGGAAATCGAGGCCTGCCAGGTGT
ACTTCACCTACGATCCCTACAGCGAAGAGGACCCCGATGAAGGTGTTGCC
GGTGCTCCTACCGGAAGCTCTCCTCAACCTCTGCAACCACTGAGCGGCGA
GGATGACGCCTACTGCACATTCCCCAGCAGAGATGACCTGCTGCTGTTCA
GCCCTAGCCTGCTCGGAGGACCTTCTCCACCATCTACAGCTCCAGGTGGA
AGCGGAGCCGGCGAGGAAAGAATGCCTCCAAGCCTGCAAGAGAGAGTGCC
CAGAGACTGGGATCCTCAGCCTCTCGGACCTCCTACACCAGGCGTGCCAG
ACCTGGTGGATTTTCAGCCTCCTCCAGAGCTGGTGCTGAGAGAAGCTGGC
GAAGAAGTGCCAGACGCCGGACCTAGAGAGGGCGTTAGCTTTCCTTGGAG
CAGACCTCCTGGACAGGGCGAGTTCAGAGCCCTGAATGCTAGACTGCCCC
TGAACACCGATGCCTACCTGTCTCTGCAAGAGCTGCAGGGACAAGACCCC
ACACACCTGGTG

[0390] An exemplary protein sequence encoding a CSR 822GBz protein of the disclosure comprises or consists of the amino acid sequence of (CD8 signal peptide, CD2 extra cellular domain (D111H), CD2 transmembrane domain, IL2RG intracellular domain #1, IL2RB intracellular domain #2, CD3z intracellular domain #3):

(SEQ ID NO: 58)
MALPVTALLLPLALLLHAARPKEITNALETWGALGQDINLDIPSFQMSDD
IDDIKWEKTSDKKKIAQFRKEKETFKEKDTYKLFKNGTLKIKHLKTDDQD
IYKVSIYHTKGKNVLEKIFDLKIQERVSKPKISWTCINTTLTCEVMNGTD
PELNLYQDGKHLKLSQRVITHKWTTSLSAKFKCTAGNKVSKESSVEPVSC
PEKGLDIYLIIGICGGGSLLMVFVALLVFYITERTMPRIPTLKNLEDLVT
EYHGNFSAWSGVSKGLAESLQPDYSERLCLVSEIPPKGGALGEGPGASPC
NQHSPYWAPPCYTLKPETNCRNTGPWLKKVLKCNTPDPSKFFSQLSSEHG
GDVQKWLSSPFPSSSFSPGGLAPEISPLEVLERDKVTQLLLQQDKVPEPA
SLSSNHSLTSCFTNQGYFFFHLPDALEIEACQVYFTYDPYSEEDPDEGVA
GAPTGSSPQPLQPLSGEDDAYCTFPSRDDLLLFSPSLLGGPSPPSTAPGG
SGAGEERMPPSLQERVPRDWDPQPLGPPTPGVPDLVDFQPPPELVLREAG
EEVPDAGPREGVSFPWSRPPGQGEFRALNARLPLNTDAYLSLQELQGQDP
THLV

[symbol]

[symbol]

[symbol]

[symbol]

[symbol]

[0391] An exemplary nucleotide sequence encoding a CSR 822GBz protein of the disclosure comprises or consists of the amino acid sequence of (CD8 signal peptide, CD2 extra cellular domain (D111H), CD2 transmembrane domain, IL2RG intracellular domain #1, IL2RB intracellular domain #2, CD3z intracellular domain #3):

(SEQ ID NO: 211)
ATGGCTCTGCCTGTGACAGCTCTGCTGCTGCCTCTGGCTCTGCTTCTGCA
TGCCGCCAGACCTAAAGAGATCACAAACGCCCTGGAAACCTGGGGAGCCC
TCGGCCAGGATATTAACCTGGACATCCCCAGCTTCCAGATGAGCGACGAC
ATCGATGACATCAAGTGGGAGAAAACCAGCGACAAGAAGAAGATCGCCCA
GTTCCGGAAAGAGAAAGAGACATTCAAAGAGAAGGACACCTACAAGCTGT
TCAAGAACGGCACCCTGAAGATCAAGCACCTGAAAACCGACGACCAGGAC
ATCTATAAGGTGTCCATCTACCACACCAAGGGCAAGAACGTGCTGGAAAA
GATCTTCGACCTCAAGATCCAAGAGCGGGTGTCCAAGCCTAAGATCAGCT
GGACCTGCATCAACACCACACTGACCTGCGAAGTGATGAACGGCACAGAC
CCCGAGCTGAACCTGTACCAGGATGGCAAACACCTGAAGCTGAGCCAGCG
CGTGATCACCCACAAGTGGACAACAAGCCTGAGCGCCAAGTTCAAGTGCA
CCGCCGGAAACAAAGTGTCCAAAGAAAGCAGCGTGGAACCCGTGTCTTGC
CCCGAGAAAGGACTGGACATCTACCTGATCATCGGCATCTGTGGCGGCGG
AAGCCTGCTGATGGTGTTTGTTGCCCTGCTGGTGTTCTACATCACCGAGC
GGACCATGCCTCGGATCCCCACACTGAAGAACCTGGAAGATCTGGTCACC
GAGTACCACGGCAACTTCTCTGCTTGGAGTGGCGTGTCAAAAGGCCTGGC
CGAAAGCCTGCAGCCTGACTACTCTGAGAGACTGTGCCTGGTGTCTGAGA
TCCCTCCTAAAGGCGGAGCCCTTGGAGAAGGACCTGGCGCCTCTCCATGT
AACCAGCACAGCCCTTATTGGGCCCCTCCTTGCTACACTCTGAAGCCCGA
GACAAACTGCCGGAACACAGGCCCCTGGCTGAAGAAAGTGCTGAAGTGCA
ACACCCCTGATCCGAGCAAGTTCTTTAGCCAGCTGAGCAGCGAGCATGGC
GGCGACGTTCAGAAATGGCTGTCTAGCCCATTTCCTAGCAGCAGCTTCAG
CCCTGGTGGACTGGCCCCTGAGATTAGCCCTCTGGAAGTGCTGGAACGGG
ACAAAGTGACCCAGCTGCTCCTGCAGCAGGATAAGGTGCCAGAACCTGCC
AGCCTGTCCAGCAATCACAGCCTGACCAGCTGCTTTACCAACCAGGGCTA
CTTCTTCTTCCATCTGCCTGACGCTCTGGAAATCGAGGCCTGCCAGGTGT
ACTTCACCTACGATCCCTACAGCGAAGAGGACCCCGATGAAGGTGTTGCC
GGTGCTCCTACCGGAAGCTCTCCTCAACCTCTGCAACCACTGAGCGGCGA
GGATGACGCCTACTGCACATTCCCCAGCAGAGATGACCTGCTGCTGTTCA
GCCCTAGCCTGCTCGGAGGACCTTCTCCACCATCTACAGCTCCAGGTGGA
AGCGGAGCCGGCGAGGAAAGAATGCCTCCAAGCCTGCAAGAGAGAGTGCC
CAGAGACTGGGATCCTCAGCCTCTCGGACCTCCTACACCAGGCGTGCCAG
ACCTGGTGGATTTTCAGCCTCCTCCAGAGCTGGTGCTGAGAGAAGCTGGC
GAAGAAGTGCCAGACGCCGGACCTAGAGAGGGCGTTAGCTTTCCTTGGAG
CAGACCTCCTGGACAGGGCGAGTTCAGAGCCCTGAATGCTAGACTGCCCC
TGAACACCGATGCCTACCTGTCTCTGCAAGAGCTGCAGGGACAAGACCCC
ACACACCTCGTCAGAGTGAAGTTCAGCAGAAGCGCCGACGCTCCCGCCTA
TAAGCAGGGACAGAACCAGCTGTACAACGAGCTGAATCTGGGGCGCAGAG
AAGAGTACGATGTGCTGGACAAGCGGAGAGGCAGAGATCCTGAGATGGGC
GGCAAGCCCAGACGGAAGAATCCTCAAGAGGGCCTGTATAATGAGCTGCA
GAAAGACAAGATGGCCGAGGCCTACTCCGAGATCGGAATGAAGGGCGAGC
GCAGAAGAGGCAAGGGACACGATGGACTGTATCAGGGCCTGAGCACCGCC
ACCAAGGATACCTATGATGCCCTGCACATGCAGGCCCTGCCACCTAGA

[0392] Chimeric Stimulator Receptors and Recombinant HLA-E Polypeptides

[0393] Adoptive cell compositions that are “universally” safe for administration to any patient requires a significant reduction or elimination of alloreactivity. Towards this end, cells of the disclosure (e.g., allogenic cells) can be modified to interrupt expression or function of a T-cell Receptor (TCR) and/or a class of Major Histocompatibility Complex (MHC). The TCR mediates graft vs host (GvH) reactions whereas the MHC mediates host vs graft (HvG) reactions. In preferred aspects, any expression and/or function of the TCR is eliminated to prevent T-cell mediated GvH that could cause death to the subject. Thus, in a preferred aspect, the disclosure provides a pure TCR-negative allogeneic T-cell composition (e.g., each cell of the composition expresses at a level so low as to either be undetectable or non-existent).

[0394] Expression and/or function of MHC class I (MHC-I, specifically, HLA-A, HLA-B, and HLA-C) is reduced or eliminated to prevent HvG and, consequently, to improve engraftment of cells in a subject. Improved engraftment results in longer persistence of the cells, and, therefore, a larger therapeutic window for the subject. Specifically, expression and/or function of a structural element of MHC-I, Beta-2-Microglobulin (B2M), is reduced or eliminated.

[0395] The above strategies induce further challenges. T Cell Receptor (TCR) knockout (KO) in T cells results in loss of expression of CD3-zeta (CD3z or CD3ζ), which is part of the TCR complex. The loss of CD3λ in TCR-KO T-cells dramatically reduces the ability of optimally activating and expanding these cells using standard stimulation/activation reagents, including, but not limited to, agonist anti-CD3 mAb. When the expression or function of any one component of the TCR complex is interrupted, all components of the complex are lost, including TCR-alpha (TCRα), TCR-beta (TCRβ), CD3-gamma (CD3γ), CD3-epsilon (CD3 ε), CD3-delta (CD3 δ), and CD3-zeta (CD3ζ). Both CD3ε and CD3 are required for T cell activation and expansion. Agonist anti-CD3 mAbs typically recognize CD3ε and possibly another protein within the complex which, in turn, signals to CD3. CD3ζ provides the primary stimulus for T cell activation (along with a secondary co-stimulatory signal) for optimal activation and expansion. Under normal conditions, full T-cell activation depends on the engagement of the TCR in conjunction with a second signal mediated by one or more co-stimulatory receptors (e.g., CD28, CD2, 4-1BBL) that boost the immune response. However, when the TCR is not present, T cell expansion is severely reduced when stimulated using standard activation/stimulation reagents, including agonist anti-CD3 mAb. In fact, T cell expansion is reduced to only 20-40% of the normal level of expansion when stimulated using standard activation/stimulation reagents, including agonist anti-CD3 mAb.

[0396] The present disclosure provides a nucleic acid sequence encoding any CSR disclosed herein. The present disclosure provides a transposon or a vector comprising a nucleic acid sequence encoding any CSR disclosed herein.

[0397] The present disclosure provides a cell comprising any CSR disclosed herein. The present disclosure provides a cell comprising a nucleic acid sequence encoding any CSR disclosed herein. The present disclosure provides a cell comprising a vector comprising a nucleic acid sequence encoding any CSR disclosed herein. The present disclosure provides a cell comprising a transposon comprising a nucleic acid sequence encoding any CSR disclosed herein.

[0398] A modified cell disclosed herein can be an allogeneic cell or an autologous cell. In some preferred aspects, the modified cell is an allogeneic cell. In some aspects, the modified cell is an autologous T-cell or a modified autologous CSR T-cell. In some preferred aspects, the modified cell is an allogeneic T-cell or a modified allogeneic CSR T-cell.

[0399] The present disclosure provides a composition comprising any CSR disclosed herein. The present disclosure provides a composition comprising a nucleic acid sequence encoding any CSR disclosed herein. The present disclosure provides a composition comprising a vector comprising a nucleic acid sequence encoding any CSR disclosed herein. The present disclosure provides a composition comprising a transposon comprising a nucleic acid sequence encoding any CSR disclosed herein. The present disclosure provides a composition comprising a modified cell disclosed herein or a composition comprising a plurality of modified cells disclosed herein.

[0400] The present disclosure provides a modified T lymphocyte (T-cell), comprising: (a) a modification of an endogenous sequence encoding a T-cell Receptor (TCR), wherein the modification reduces or eliminates a level of expression or activity of the TCR; and (b) a chimeric stimulatory receptor (CSR) comprising: (i) an ectodomain comprising an activation component, wherein the activation component is isolated or derived from a first protein; (ii) a transmembrane domain; and (iii) an endodomain comprising at least one signal transduction domain, wherein the at least one signal transduction domain is isolated or derived from a second protein; wherein the first protein and the second protein are not identical.

[0401] The modified T-cell can further comprise an inducible proapoptotic polypeptide. The modified T-cell can further comprise a modification of an endogenous sequence encoding Beta-2-Microglobulin (B2M), wherein the modification reduces or eliminates a level of expression or activity of a major histocompatibility complex (WIC) class I (MHC-I).

[0402] The modified T-cell can further comprise a non-naturally occurring polypeptide comprising an HLA class I histocompatibility antigen, alpha chain E (HLA-E) polypeptide. The non-naturally occurring polypeptide comprising a HLA-E polypeptide can further comprise a B2M signal peptide. The non-naturally occurring polypeptide comprising a HLA-E polypeptide can further comprise a B2M polypeptide. The non-naturally occurring polypeptide comprising an HLA-E polypeptide can further comprise a linker, wherein the linker is positioned between the B2M polypeptide and the HLA-E polypeptide. The non-naturally occurring polypeptide comprising an HLA-E polypeptide can further comprise a peptide and a B2M polypeptide. The non-naturally occurring polypeptide comprising an HLA-E can further comprise a first linker positioned between the B2M signal peptide and the peptide, and a second linker positioned between the B2M polypeptide and the peptide encoding the HLA-E.

[0403] The modified T-cell can further comprise a non-naturally occurring antigen receptor, a sequence encoding a therapeutic polypeptide, or a combination thereof. The non-naturally occurring antigen receptor can comprise a chimeric antigen receptor (CAR).

[0404] The CSR can be transiently expressed in the modified T-cell. The CSR can be stably expressed in the modified T-cell. The polypeptide comprising the HLA-E polypeptide can be transiently expressed in the modified T-cell. The polypeptide comprising the HLA-E polypeptide can be stably expressed in the modified T-cell. The inducible proapoptotic polypeptide can be transiently expressed in the modified T-cell. The inducible proapoptotic polypeptide can be stably expressed in the modified T-cell. The non-naturally occurring antigen receptor or a sequence encoding a therapeutic protein can be transiently expressed in the modified T-cell. The non-naturally occurring antigen receptor or a sequence encoding a therapeutic protein can be stably expressed in the modified T-cell.

[0405] Gene editing compositions, including but not limited to, RNA-guided fusion proteins comprising dCas9-Clo051, as described in detail herein, can be used to target and decrease or eliminate expression of an endogenous T-cell receptor. In preferred aspects, the gene editing compositions target and delete a gene, a portion of a gene, or a regulatory element of a gene (such as a promoter) encoding an endogenous T-cell receptor. Non-limiting examples of primers (including a T7 promoter, genome target sequence, and gRNA scaffold) for the generation of guide RNA (gRNA) templates for targeting and deleting TCR-alpha (TCR-a), targeting and deleting TCR-beta (TCR-β), and targeting and deleting beta-2-microglobulin (β2M) are disclosed in PCT Application No. PCT/US2019/049816.

[0406] Gene editing compositions, including but not limited to, RNA-guided fusion proteins comprising dCas9-Clo051, can be used to target and decrease or eliminate expression of an endogenous MHCI, MHCII, or MHC activator. In preferred aspects, the gene editing compositions target and delete a gene, a portion of a gene, or a regulatory element of a gene (such as a promoter) encoding one or more components of an endogenous MHO, MHCII, or MHC activator. Non-limiting examples of guide RNAs (gRNAs) for targeting and deleting MHC activators are disclosed in PCT Application No. PCT/US2019/049816.

A detailed description of non-naturally occurring chimeric stimulatory receptors, genetic modifications of endogenous sequences encoding TCR-alpha (TCR-α), TCR-beta (TCR-β), and/or Beta-2-Microglobulin (β2M), and non-naturally occurring polypeptides comprising an HLA class I histocompatibility antigen, alpha chain E (HLA-E) polypeptide is disclosed in PCT Application No. PCT/US2019/049816.

### Cells and Modified Cells of the Disclosure

[0407] Regulatory T cells

[0408] “Regulatory T lymphocyte” or “Treg cell” or “Treg,” as used in the present specification and claims are synonymous and are intended to have its standard definition as used in the art. Treg cells are a specialized subpopulation of T cells that act in a “regulatory” way to suppress activation of the immune system and thereby maintain immune system homeostasis and tolerance to self-antigens. Tregs have sometimes been referred to suppressor T cells. Treg cells are characterized by expression of the forkhead family transcription factor Foxp3 (forkhead box p3). They are characterized by expression of CD4. They may express CD25 (also known as Interleukin 2 receptor subunit alpha, or IL2RA).

[0409] In general, T regulatory cells have been identified as a CD4+CD25+ T cell population capable of suppressing an immune response. The identification of Foxp3 as a “master-regulator” of Tregs helped define Tregs as a distinct T cell lineage. The identification of additional antigenic markers on the surface of Tregs has enabled identification and FACS sorting of viable Tregs to greater purity, resulting in a more highly-enriched and suppressive Treg population. In addition to CD4 and CD25, both mouse and human Tregs express GITR/AITR, CTLA-4, and express low levels of CD127 (IL-7Ra).

[0410] Moreover, Tregs can exist in different states which can be identified based on their expression of surface markers. Tregs which develop in the thymus from CD4+ thymocytes are known as “natural” Tregs, however Tregs can also be induced in the periphery from naive CD4+ T cells in response to low-dose engagement of the TCR, TGF beta and IL-2. These “induced” Tregs secrete the immunosuppressive cytokine IL-10. The phenotype of Tregs changes again as they become activated, and markers including GARP in mouse and human, CD45RA in human, and CD103 in mouse have been shown to be useful for the identification of activated Tregs. Tregs are important in the maintenance of immune cell homeostasis as evidenced by undesirable consequences of genetic or physical ablation of the Treg population. Treg cells generally maintain order in the immune system by enforcing a dominant negative regulation on other immune cells. Broadly classified into natural or adaptive (induced) Tregs; natural Tregs are CD4⁺CD25⁺ T cells which develop, and emigrate from the thymus to play a role in immune homeostasis. Adaptive Tregs are non-regulatory CD4⁺ T cells which acquire CD25 (IL-2R alpha) expression outside of the thymus, and may be induced by inflammation and disease processes, such as autoimmunity and cancer. Functional Tregs can also be forced through the overexpression of either of the two common human FoxP3 isoforms in CD4+CD25-cells. These are classified as “forced Tregs”.

[0411] There is increasing evidence that Tregs acquire their function through a myriad of mechanisms that may include the secretion of immunosuppressive soluble factors such as IL-10 and TGF beta, cell contact mediated regulation via the high affinity TCR and other costimulatory molecules such as CTLA-4 and GITR. Under the influence of TGF beta, adaptive Treg cells mature in peripheral sites, including mucosa-associated lymphoid tissue (MALT), from CD4+ Treg precursors, where they acquire the expression of markers typical of Tregs, including CD25, CTLA4 and GITR/AITR. Upon up-regulation of the transcription factor Foxp3, Treg cells begin their suppressive effect. This includes the secretion of cytokines including IL-10 and TGF beta which may induce cell-cycle arrest or apoptosis in effector T cells, and blocking co-stimulation and maturation of dendritic cells.

[0412] In some aspects, at least 5%, at least 10%, at least 15%, at least 20%, at least 25%, at least 30%, at least 35%, at least 40%, at least 45%, at least 50%, at least 55%, at least 60%, at least 65%, at least 70%, at least 75%, at least 80%, at least 85%, at least 90%, at least 95%, at least 96%, at least 97%, at least 98%, at least 99%, or 100% or any percentage in between of the plurality of modified T cells in the population expresses one or more cell-surface marker(s) of a regulatory T cell (Treg); and wherein the one or more cell-surface marker(s) comprise CD4, CD25, FOXP3 or CD127. In certain embodiments, the Treg cell is CD4+CD25+ and FOXP3+. In certain embodiments, the Treg cell is CD4+CD25+ FOXP3+ and CD127^{low}. In certain embodiments, the Treg cell is CD4+CD25+CD127^{low}. In certain embodiments, the Treg cell is CD4+CD25+ FoxP3+CD127^{low} and CD45RA+.

[0413] A plurality of modified cells of the population comprise a transgene or a sequence encoding the transgene (e.g., a CSR), wherein at least 75%, at least 85%, at least 90%, at least 91%, at least 92%, at least 93%, at least 94%, at least 95%, at least 96%, at least 97%, at least 98%, at least 99%, at least 99.5%, at least 99.9% or 100% of the plurality of cells of the population comprise the transgene or the sequence encoding the transgene, wherein at least 2%, 5%, 10%, 15%, 20%, 25%, 30%, 35%, 40%, 45%, 50%, 60%, 65%, 70%, 75%, 80%, 85%, 90%, 95%, 99% or any percentage in between of the plurality of modified T cells of the population expresses one or more cell-surface marker(s) of a regulatory T cell (Treg).

Effector T cells

[0414] “Effector T cells” or “Teff cell” or “Teff” or “immune effector T cell” as used in the present specification and claims are synonymous and are intended to have its standard definition as used in the art. Effector T cells (Teffs) describes a group of cells that includes several T cell types that actively respond to a stimulus. Teff cells may refer to a cell that is involved with an immune response, e.g., in promotion of an immune effector response. Examples of effector cells include alpha/beta T cells and gamma/delta T cells, They are characterized by expression of CD3. They may express CD4. They may express CD8.

[0415] “Immune effector function or immune effector response,” as used in the present specific, refers to function or response, e.g., of an immune effector cell, that enhances or promotes an immune attack of a target cell. E.g., an immune effector function or response refers a property of a T cell that promotes killing or the inhibition of growth or proliferation, of a target cell. In the case of a T cell, primary stimulation and co-stimulation are examples of immune effector function or response. The term “effector function” refers to a specialized function of a cell. Effector function of a T cell, for example, may be cytolytic activity or helper activity including the secretion of cytokines. In some embodiments, the effector T cells is a CD8+ T cell. In some embodiments the effector T cell is an effector cytotoxic T cell (effector CTL). In some embodiments the effector T cells is a memory cytotoxic T cell (memory CTL).

[0416] One major difference between regulatory T cells and effectors cells is that regulatory T cells typically serve to modulate and deactivate the immune response, while effector T cells usually begin with immune-promoting cytokines and then switch to inhibitory cytokines later in their life cycle.

[0417] In certain embodiments, the Teff cell is CD4+CD3+. In certain embodiments, the Teff cell is CD8+CD3+. In certain embodiments the Teff is CD4+, CD3+, CD62L−, CCR7−, CD45RA+ and CD45RO−. In certain embodiments the Teff is CD8+, CD3+, CD62L−, CCR7-, CD45RA+ and CD45RO−.

[0418] In some aspects, at least 5%, at least 10%, at least 15%, at least 20%, at least 25%, at least 30%, at least 35%, at least 40%, at least 45%, at least 50%, at least 55%, at least 60%, at least 65%, at least 70%, at least 75%, at least 80%, at least 85%, at least 90%, at least 95%, at least 96%, at least 97%, at least 98%, at least 99%, or 100% or any percentage in between of the plurality of modified T cells in the population expresses one or more cell-surface marker(s) of a effector T cell (Teff); and wherein the one or more cell-surface marker(s) comprise CD8+CD3+. The cell-surface markers can comprise one or more of CD4+, CD3+, CD62L−, CCR7−, CD45RA+ and CD45RO−. The cell-surface markers can comprise one or more of CD8+, CD3+, CD62L−, CCR7−, CD45RA+ and CD45RO−.

[0419] A plurality of modified cells of the population comprise a transgene or a sequence encoding the transgene (e.g., a CSR), wherein at least 75%, at least 85%, at least 90%, at least 91%, at least 92%, at least 93%, at least 94%, at least 95%, at least 96%, at least 97%, at least 98%, at least 99%, at least 99.5%, at least 99.9% or 100% of the plurality of cells of the population comprise the transgene or the sequence encoding the transgene, wherein at least 2%, 5%, 10%, 15%, 20%, 25%, 30%, 35%, 40%, 45%, 50%, 60%, 65%, 70%, 75%, 80%, 85%, 90%, 95%, 99% or any percentage in between of the plurality of modified T cells of the population expresses one or more cell-surface marker(s) of a effector T cell (Teff).

### T Cells

[0420] Modified T cells of the disclosure may be derived from modified hematopoietic stem and progenitor cells (HSPCs) or modified HSCs. Unlike traditional biologics and chemotherapeutics, the disclosed modified-T cells the capacity to rapidly reproduce upon antigen recognition, thereby potentially obviating the need for repeat treatments. To achieve this, in some embodiments, modified-T cells not only drive an initial response, but also persist in the patient as a stable population of viable memory T cells to prevent potential relapses. Alternatively, in some aspects, when it is not desired, the modified-T cells do not persist in the patient.

[0421] Intensive efforts have been focused on the development of antigen receptor molecules that do not cause T cell exhaustion through antigen-independent (tonic) signaling, as well as of a modified-T cell product containing early memory T cells, especially stem cell memory (T_{SCM}) or stem cell-like T cells. Stem cell-like modified-T cells of the disclosure exhibit the greatest capacity for self-renewal and multipotent capacity to derive central memory (T_{CM}) T cells or T_{CM} like cells, effector memory (T_{EM}) and effector T cells (T_{E}), thereby producing better tumor eradication and long-term modified-T cell engraftment. A linear pathway of differentiation may be responsible for generating these cells: Naive T cells (TN)>T_{SCM}>T_{CM}>T_{EM}>T_{E}>T_{TE}, whereby TN is the parent precursor cell that directly gives rise to T_{SCM}, which then, in turn, directly gives rise to T_{CM}, etc. Compositions of T cells of the disclosure can comprise one or more of each parental T cell subset with T_{SCM} cells being the most abundant (e.g., T_{SCM}>T_{CM}>T_{EM}>T_{E}>T_{TE}).

[0422] The immune cell precursor can be differentiated into or is capable of differentiating into an early memory T cell, a stem cell like T-cell, a Naive T cells (T_{N}), a T_{SCM}, a T_{CM}, a T_{EM}, a T_{E}, or a T_{TE}. The immune cell precursor can be a primitive HSC, an HSC, or a HSC descendent cell of the disclosure. The immune cell can be an early memory T cell, a stem cell like T-cell, a Naive T cells (T_{N}), a T_{SCM}, a T_{CM}, a T_{EM}, a T_{E}, or a T_{TE}.

[0423] The methods of the disclosure can modify and/or produce a population of modified T cells, wherein at least 2%, 5%, 10%, 15%, 20%, 25%, 30%, 35%, 40%, 45%, 50%, 60%, 65%, 70%, 75%, 80%, 85%, 90%, 95%, 99% or any percentage in between of a plurality of modified T cells in the population expresses one or more cell-surface marker(s) of an early memory T cell. The population of modified early memory T cells comprises a plurality of modified stem cell-like T cells. The population of modified early memory T cells comprises a plurality of modified T_{SCM} cells. The population of modified early memory T cells comprises a plurality of modified T_{CM} cells.

[0424] The methods of the disclosure can modify and/or produce a population of modified T cells, wherein at least 2%, 5%, 10%, 15%, 20%, 25%, 30%, 35%, 40%, 45%, 50%, 60%, 65%, 70%, 75%, 80%, 85%, 90%, 95%, 99% or any percentage in between of the plurality of modified T cells in the population expresses one or more cell-surface marker(s) of a stem cell-like T cell. The population of modified stem cell-like T cells comprises a plurality of modified T_{SCM} cells. The population of modified stem cell-like T cells comprises a plurality of modified T_{CM} cells.

[0425] In some aspects, at least 5%, at least 10%, at least 15%, at least 20%, at least 25%, at least 30%, at least 35%, at least 40%, at least 45%, at least 50%, at least 55%, at least 60%, at least 65%, at least 70%, at least 75%, at least 80%, at least 85%, at least 90%, at least 95%, at least 96%, at least 97%, at least 98%, at least 99%, or 100% or any percentage in between of the plurality of modified T cells in the population expresses one or more cell-surface marker(s) of a stem memory T cell (T_{SCM}) or a T_{SCM}-like cell; and wherein the one or more cell-surface marker(s) comprise CD45RA and CD62L. The cell-surface markers can comprise one or more of CD62L, CD45RA, CD28, CCR7, CD127, CD45RO, CD95, CD95 and IL-2Rβ. The cell-surface markers can comprise one or more of CD45RA, CD95, IL-2Rβ, CCR7, and CD62L.

[0426] In some aspects, at least 5%, at least 10%, at least 15%, at least 20%, at least 25%, at least 30%, at least 35%, at least 40%, at least 45%, at least 50%, at least 55%, at least 60%, at least 65%, at least 70%, at least 75%, at least 80%, at least 85%, at least 90%, at least 95%, at least 96%, at least 97%, at least 98%, at least 99%, or 100% of the plurality of modified T cells in the population expresses one or more cell-surface marker(s) of a central memory T cell (T_{CM}) or a T_{CM}-like cell; and wherein the one or more cell-surface marker(s) comprise CD45RO and CD62L. The cell-surface markers can comprise one or more of CD45RO, CD95, IL-2Rβ, CCR7, and CD62L.

[0427] The methods of the disclosure can modify and/or produce a population of modified T cells, wherein at least 2%, 5%, 10%, 15%, 20%, 25%, 30%, 35%, 40%, 45%, 50%, 60%, 65%, 70%, 75%, 80%, 85%, 90%, 95%, 99% or any percentage in between of the plurality of modified T cells in the population expresses one or more cell-surface marker(s) of a naive T cell (T_{N}). The cell-surface markers can comprise one or more of CD45RA, CCR7 and CD62L.

[0428] The methods of the disclosure can modify and/or produce a population of modified T cells, wherein at least 2%, 5%, 10%, 15%, 20%, 25%, 30%, 35%, 40%, 45%, 50%, 60%, 65%, 70%, 75%, 80%, 85%, 90%, 95%, 99% or any percentage in between of the plurality of modified T cells in the population expresses one or more cell-surface marker(s) of an effector T-cell (modified T_{EFF}). The cell-surface markers can comprise one or more of CD45RA, CD95, and IL-2Rβ.

[0429] The methods of the disclosure can modify and/or produce a population of modified T cells, wherein at least 2%, 5%, 10%, 15%, 20%, 25%, 30%, 35%, 40%, 45%, 50%, 60%, 65%, 70%, 75%, 80%, 85%, 90%, 95%, 99% or any percentage in between of the plurality of modified T cells of the population expresses one or more cell-surface marker(s) of a stem cell-like T cell, a stem memory T cell (T_{SCM}) or a central memory T cell (T_{CM}).

[0430] A plurality of modified cells of the population comprise a transgene or a sequence encoding the transgene (e.g., a CSR), wherein at least 75%, at least 85%, at least 90%, at least 91%, at least 92%, at least 93%, at least 94%, at least 95%, at least 96%, at least 97%, at least 98%, at least 99%, at least 99.5%, at least 99.9% or 100% of the plurality of cells of the population comprise the transgene or the sequence encoding the transgene, wherein at least 2%, 5%, 10%, 15%, 20%, 25%, 30%, 35%, 40%, 45%, 50%, 60%, 65%, 70%, 75%, 80%, 85%, 90%, 95%, 99% or any percentage in between of the plurality of modified T cells of the population expresses one or more cell-surface marker(s) of a stem cell-like T cell, a stem memory T cell (T_{SCM}) or a central memory T cell (T_{CM}).

[0431] A plurality of modified cells of the population comprise a transgene or a sequence encoding the transgene (e.g., a CSR), wherein at least 75%, at least 85%, at least 90%, at least 91%, at least 92%, at least 93%, at least 94%, at least 95%, at least 96%, at least 97%, at least 98%, at least 99%, at least 99.5%, at least 99.9% or 100% of the plurality of cells of the population comprise the transgene or the sequence encoding the transgene, wherein at least 70%, at least 75%, at least 80%, at least 85%, at least 90%, at least 91%, at least 92%, at least 93%, at least 94%, at least 95%, at least 96%, at least 97%, at least 98%, at least 99%, at least 99.5%, at least 99.9% or 100% of the population of modified cells express one or more cell-surface marker(s) comprising CD34 or wherein at least about 70% to about 99%, about 75% to about 95% or about 85% to about 95% of the population of modified cells express one or more cell-surface marker(s) comprising CD34 (e.g., comprise the cell-surface marker phenotype CD34+).

[0432] A plurality of modified cells of the population comprise a transgene or a sequence encoding the transgene (e.g., a CSR), wherein at least 75%, at least 85%, at least 90%, at least 91%, at least 92%, at least 93%, at least 94%, at least 95%, at least 96%, at least 97%, at least 98%, at least 99%, at least 99.5%, at least 99.9% or 100% of the plurality of cells of the population comprise the transgene or the sequence encoding the transgene, wherein at least 40%, at least 45%, at least 50%, at least 55%, at least 60%, at least 65%, at least 70%, at least 75%, at least 80%, at least 85%, at least 90%, at least 91%, at least 92%, at least 93%, at least 94%, at least 95%, at least 96%, at least 97%, at least 98%, at least 99%, at least 99.5%, at least 99.9% or 100% of the population of modified cells express one or more cell-surface marker(s) comprising CD34 and do not express one or more cell-surface marker(s) comprising CD38, or wherein at least about 45% to about 90%, about 50% to about 80% or about 65% to about 75% of the population of modified cells express one or more cell-surface marker(s) comprising CD34 and do not express one or more cell-surface marker(s) comprising CD38 (e.g., comprise the cell-surface marker phenotype CD34+ and CD38−).

[0433] A plurality of modified cells of the population comprise a transgene or a sequence encoding the transgene (e.g., a CSR), wherein at least 75%, at least 85%, at least 90%, at least 91%, at least 92%, at least 93%, at least 94%, at least 95%, at least 96%, at least 97%, at least 98%, at least 99%, at least 99.5%, at least 99.9% or 100% of the plurality of cells of the population comprise the transgene or the sequence encoding the transgene, wherein at least 0.1%, at least 0.2%, at least 0.3%, at least 0.4%, at least 0.5%, at least 0.6%, at least 0.7%, at least 0.8%, at least 0.9%, at least 1%, at least 1.5%, at least 2%, at least 3%, at least 4%, at least 5%, at least 10%, at least 15%, at least 20%, at least 25%, at least 30%, at least 35%, at least 40%, at least 45%, at least 50%, at least 55%, at least 60%, at least 65%, at least 70%, at least 75%, at least 80%, at least 85%, at least 90%, at least 91%, at least 92%, at least 93%, at least 94%, at least 95%, at least 96%, at least 97%, at least 98%, at least 99%, at least 99.5%, at least 99.9% or 100% of the population of modified cells express one or more cell-surface marker(s) comprising CD34 and CD90 and do not express one or more cell-surface marker(s) comprising CD38, or wherein at least about 0.2% to about 40%, about 0.2% to about 30%, about 0.2% to about 2% or 0.5% to about 1.5% of the population of modified cells express one or more cell-surface marker(s) comprising CD34 and CD90 and do not express one or more cell-surface marker(s) comprising CD38 (e.g., comprise the cell-surface marker phenotype CD34+, CD38- and CD90+).

[0434] A plurality of modified cells of the population comprise a transgene or a sequence encoding the transgene (e.g., a CSR), wherein at least 75%, at least 85%, at least 90%, at least 91%, at least 92%, at least 93%, at least 94%, at least 95%, at least 96%, at least 97%, at least 98%, at least 99%, at least 99.5%, at least 99.9% or 100% of the plurality of cells of the population comprise the transgene or the sequence encoding the transgene, wherein at least 0.1%, at least 0.2%, at least 0.3%, at least 0.4%, at least 0.5%, at least 0.6%, at least 0.7%, at least 0.8%, at least 0.9%, at least 1%, at least 1.5%, at least 2%, at least 3%, at least 4%, at least 5%, at least 10%, at least 15%, at least 20%, at least 25%, at least 30%, at least 35%, at least 40%, at least 45%, at least 50%, at least 55%, at least 60%, at least 65%, at least 70%, at least 75%, at least 80%, at least 85%, at least 90%, at least 91%, at least 92%, at least 93%, at least 94%, at least 95%, at least 96%, at least 97%, at least 98%, at least 99%, at least 99.5%, at least 99.9% or 100% of the population of modified cells express one or more cell-surface marker(s) comprising CD34 and CD90 and do not express one or more cell-surface marker(s) comprising CD38 and CD45RA, or wherein at least about 0.2% to about 40%, about 0.2% to about 30%, about 0.2% to about 2% or 0.5% to about 1.5% of the population of modified cells express one or more cell-surface marker(s) comprising CD34 and CD90 and do not express one or more cell-surface marker(s) comprising CD38 and CD45RA (e.g., comprise the cell-surface marker phenotype CD34+, CD38−, CD90+, CD45RA−).

[0435] A plurality of modified cells of the population comprise a transgene or a sequence encoding the transgene (e.g., a CSR), wherein at least 75%, at least 85%, at least 90%, at least 91%, at least 92%, at least 93%, at least 94%, at least 95%, at least 96%, at least 97%, at least 98%, at least 99%, at least 99.5%, at least 99.9% or 100% of the plurality of cells of the population comprise the transgene or the sequence encoding the transgene, wherein at least 0.01%, at least 0.02%, at least 0.03%, at least 0.04%, at least 0.05%, at least 0.06%, at least 0.07%, at least 0.08%, at least 0.09%, at least 0.1%, at least 0.2%, at least 0.3%, at least 0.4%, at least 0.5%, at least 0.6%, at least 0.7%, at least 0.8%, at least 0.9%, at least 1%, at least 1.5%, at least 2%, at least 3%, at least 4%, at least 5%, at least 10%, at least 15%, at least 20%, at least 25%, at least 30%, at least 35%, at least 40%, at least 45%, at least 50%, at least 55%, at least 60%, at least 65%, at least 70%, at least 75%, at least 80%, at least 85%, at least 90%, at least 91%, at least 92%, at least 93%, at least 94%, at least 95%, at least 96%, at least 97%, at least 98%, at least 99%, at least 99.5%, at least 99.9% or 100% of the population of modified cells express one or more cell-surface marker(s) comprising CD34, CD90 and CD49f and do not express one or more cell-surface marker(s) comprising CD38 and CD45RA, or wherein at least about 0.02% to about 30%, about 0.02% to about 2%, about 0.04% to about 2% or about 0.04% to about 1% of the population of modified cells express one or more cell-surface marker(s) comprising CD34, CD90 and CD49f and do not express one or more cell-surface marker(s) comprising CD38 and CD45RA (e.g., comprise the cell-surface marker phenotype CD34+, CD38−, CD90+, CD45RA- and CD49f+).

[0436] A plurality of modified cells of the population comprise a transgene or a sequence encoding the transgene (e.g., a CSR), wherein at least 75%, at least 85%, at least 90%, at least 91%, at least 92%, at least 93%, at least 94%, at least 95%, at least 96%, at least 97%, at least 98%, at least 99%, at least 99.5%, at least 99.9% or 100% of the plurality of cells of the population comprise the transgene or the sequence encoding the transgene, wherein at least 0.01%, at least 0.02%, at least 0.03%, at least 0.04%, at least 0.05%, at least 0.06%, at least 0.07%, at least 0.08%, at least 0.09%, at least 0.1%, at least 0.2%, at least 0.3%, at least 0.4%, at least 0.5%, at least 0.6%, at least 0.7%, at least 0.8%, at least 0.9%, at least 1%, at least 1.5%, at least 2%, at least 3%, at least 4%, at least 5%, at least 10%, at least 15%, at least 20%, at least 25%, at least 30%, at least 35%, at least 40%, at least 45%, at least 50%, at least 55%, at least 60%, at least 65%, at least 70%, at least 75%, at least 80%, at least 85%, at least 90%, at least 91%, at least 92%, at least 93%, at least 94%, at least 95%, at least 96%, at least 97%, at least 98%, at least 99%, at least 99.5%, at least 99.9% or 100% of the population of modified cells express one or more cell-surface marker(s) comprising CD34 and CD90 and do not express one or more cell-surface marker(s) comprising CD45RA, or wherein at least about 0.2% to about 5%, about 0.2% to about 3% or about 0.4% to about 3% of the population of modified cells express one or more cell-surface marker(s) comprising CD34 and CD90 and do not express one or more cell-surface marker(s) comprising CD45RA (e.g., comprise the cell-surface marker phenotype CD34+, CD90+ and CD45RA−).

[0437] Immune Precursor Cells, NK cells and B cells

[0438] The immune precursor cells can comprise any cells which can differentiate into one or more types of immune cells. The immune precursor cells can comprise multipotent stem cells that can self-renew and develop into immune cells. The immune precursor cells can comprise hematopoietic stem cells (HSCs) or descendants thereof. The immune precursor cells can comprise precursor cells that can develop into immune cells. The immune precursor cells can comprise hematopoietic progenitor cells (HPCs).

[0439] Hematopoietic stem cells (HSCs) are multipotent, self-renewing cells. All differentiated blood cells from the lymphoid and myeloid lineages arise from HSCs. HSCs can be found in adult bone marrow, peripheral blood, mobilized peripheral blood, peritoneal dialysis effluent and umbilical cord blood.

[0440] HSCs can be isolated or derived from a primary or cultured stem cell. HSCs can be isolated or derived from an embryonic stem cell, a multipotent stem cell, a pluripotent stem cell, an adult stem cell, or an induced pluripotent stem cell (iPSC).

[0441] Immune precursor cells can comprise an HSC or an HSC descendent cell. Non-limiting examples of HSC descendent cells include multipotent stem cells, lymphoid progenitor cells, natural killer (NK) cells, T lymphocyte cells (T-cells), B lymphocyte cells (B-cells), myeloid progenitor cells, neutrophils, basophils, eosinophils, monocytes and macrophages.

[0442] HSCs produced by the disclosed methods can retain features of “primitive” stem cells that, while isolated or derived from an adult stem cell and while committed to a single lineage, share characteristics of embryonic stem cells. For example, the “primitive” HSCs produced by the disclosed methods retain their “stemness” following division and do not differentiate. Consequently, as an adoptive cell therapy, the “primitive” HSCs produced by the disclosed methods not only replenish their numbers, but expand in vivo. “Primitive” HSCs produced by disclosed the methods can be therapeutically-effective when administered as a single dose.

[0443] Primitive HSCs can be CD34+. Primitive HSCs can be CD34+ and CD38−. Primitive HSCs can be CD34+, CD38- and CD90+. Primitive HSCs can be CD34+, CD38−, CD90+ and CD45RA−. Primitive HSCs can be CD34+, CD38−, CD90+, CD45RA−, and CD49f+. Primitive HSCs can be CD34+, CD38−, CD90+, CD45RA−, and CD49f+.

[0444] Primitive HSCs, HSCs, and/or HSC descendent cells can be modified according to the disclosed methods to express an exogenous sequence (e.g., a chimeric antigen receptor or therapeutic protein). Modified primitive HSCs, modified HSCs, and/or modified HSC descendent cells can be forward differentiated to produce a modified immune cell including, but not limited to, a modified T cell, a modified natural killer cell and/or a modified B-cell.

[0445] The modified immune or immune precursor cells can be NK cells. The NK cells can be cytotoxic lymphocytes that differentiate from lymphoid progenitor cells. Modified NK cells can be derived from modified hematopoietic stem and progenitor cells (HSPCs) or modified HSCs. In some aspects, non-activated NK cells are derived from CD3-depleted leukapheresis (containing CD14/CD19/CD56+ cells).

[0446] The modified immune or immune precursor cells can be B cells. B cells are a type of lymphocyte that express B cell receptors on the cell surface. B cell receptors bind to specific antigens. Modified B cells can be derived from modified hematopoietic stem and progenitor cells (HSPCs) or modified HSCs.

[0447] Modified T cells of the disclosure may be derived from modified hematopoietic stem and progenitor cells (HSPCs) or modified HSCs. Unlike traditional biologics and chemotherapeutics, the disclosed modified-T cells the capacity to rapidly reproduce upon antigen recognition, thereby potentially obviating the need for repeat treatments. To achieve this, in some embodiments, modified-T cells not only drive an initial response, but also persist in the patient as a stable population of viable memory T cells to prevent potential relapses. Alternatively, in some aspects, when it is not desired, the modified-T cells do not persist in the patient.

[0448] Compositions and Methods of Producing, Activating and/or Expanding T cells

[0449] In some embodiments of the methods of the disclosure, a buffer comprises the immune cell or precursor thereof. The buffer maintains or enhances a level of cell viability and/or a Treg phenotype of the immune cell or precursor thereof, including T cells. In certain embodiments, the buffer maintains or enhances a level of cell viability and/or a Treg phenotype of the primary human T cells prior to the nucleofection. In certain embodiments, the buffer maintains or enhances a level of cell viability and/or a Treg phenotype of the primary human T cells during the nucleofection. In certain embodiments, the buffer maintains or enhances a level of cell viability and/or a Treg phenotype of the primary human T cells following the nucleofection. In certain embodiments, the buffer comprises one or more of KCl, MgCl₂, ClNa, Glucose and Ca(NO₃)₂ in any absolute or relative abundance or concentration, and, optionally, the buffer further comprises a supplement selected from the group consisting of HEPES, Tris/HCl, and a phosphate buffer. In certain embodiments, the buffer comprises 5 mM KCl, 15 mM MgCl₂, 90 mM ClNa, 10 mM Glucose and 0.4 mM Ca(NO₃)₂. In certain embodiments, the buffer comprises 5 mM KCl, 15 mM MgCl₂, 90 mM ClNa, 10 mM Glucose and 0.4 mM Ca(NO₃)₂ and a supplement comprising 20 mM HEPES and 75 mM Tris/HCl. In certain embodiments, the buffer comprises 5 mM KCl, 15 mM MgCl₂, 90 mM ClNa, 10 mM Glucose and 0.4 mM Ca(NO₃)₂ and a supplement comprising 40 mM Na₂HPO₄/NaH₂PO₄ at pH 7.2. In certain embodiments, the composition comprising primary human T cells comprises 100 μl of the buffer and between 5×10⁶ and 25×10⁶ cells. In certain embodiments, the composition comprises a scalable ratio of 250×10⁶ primary human T cells per milliliter of buffer or other media during the introduction step.

[0450] In some embodiments of the methods of the disclosure, the methods comprise contacting an immune cell of the disclosure, including a T cell of the disclosure, and a T cell expansion composition. In some embodiments of the methods of the disclosure, the step of introducing a transposon and/or transposase of the disclosure into an immune cell of the disclosure may further comprise contacting the immune cell and a T cell expansion composition. In some embodiments, including those in which the introducing step of the methods comprises an electroporation or a nucleofection step, the electroporation or a nucleofection step may be performed with the immune cell contacting T cell expansion composition of the disclosure.

[0451] In some embodiments of the methods of the disclosure, the T cell expansion composition comprises, consists essentially of or consists of phosphorus; one or more of an octanoic acid, a palmitic acid, a linoleic acid, and an oleic acid; a sterol; and an alkane.

[0452] In certain embodiments of the methods of producing a modified T cell of the disclosure, the expansion supplement comprises one or more cytokine(s). The one or more cytokine(s) may comprise any cytokine, including but not limited to, lymphokines. Exemplary lympokines include, but are not limited to, interleukin-2 (IL-2), interleukin-3 (IL-3), interleukin-4 (IL-4), interleukin-5 (IL-5), interleukin-6 (IL-6), interleukin-7 (IL-7), interleukin-15 (IL-15), interleukin-21 (IL-21), granulocyte-macrophage colony-stimulating factor (GM-CSF) and interferon-gamma (INFγ). The one or more cytokine(s) may comprise IL-2.

[0453] In some embodiments of the methods of the disclosure, the T cell expansion composition comprises human serum albumin, recombinant human insulin, human transferrin, 2-Mercaptoethanol, and an expansion supplement. In certain embodiments of this method, the T cell expansion composition further comprises one or more of octanoic acid, nicotinamide, 2,4,7,9-tetramethyl-5-decyn-4,7-diol (TMDD), diisopropyl adipate (DIPA), n-butyl-benzenesulfonamide, 1,2-benzenedicarboxylic acid, bis(2-methylpropyl) ester, palmitic acid, linoleic acid, oleic acid, stearic acid hydrazide, oleamide, a sterol and an alkane. In certain embodiments of this method, the T cell expansion composition further comprises one or more of octanoic acid, palmitic acid, linoleic acid, oleic acid and a sterol. In certain embodiments of this method, the T cell expansion composition further comprises one or more of octanoic acid at a concentration of between 0.9 mg/kg to 90 mg/kg, inclusive of the endpoints; palmitic acid at a concentration of between 0.2 mg/kg to 20 mg/kg, inclusive of the endpoints; linoleic acid at a concentration of between 0.2 mg/kg to 20 mg/kg, inclusive of the endpoints; oleic acid at a concentration of 0.2 mg/kg to 20 mg/kg, inclusive of the endpoints; and a sterol at a concentration of about 0.1 mg/kg to 10 mg/kg, inclusive of the endpoints. In certain embodiments of this method, the T cell expansion composition further comprises one or more of octanoic acid at a concentration of about 9 mg/kg, palmitic acid at a concentration of about 2 mg/kg, linoleic acid at a concentration of about 2 mg/kg, oleic acid at a concentration of about 2 mg/kg and a sterol at a concentration of about 1 mg/kg. In certain embodiments of this method, the T cell expansion composition further comprises one or more of octanoic acid at a concentration of between 6.4 μmol/kg and 640 μmol/kg, inclusive of the endpoints; palmitic acid at a concentration of between 0.7 μmol/kg and 70 μmol/kg, inclusive of the endpoints; linoleic acid at a concentration of between 0.75 μmol/kg and 75 μmol/kg, inclusive of the endpoints; oleic acid at a concentration of between 0.75 μmol/kg and 75 μmol/kg, inclusive of the endpoints; and a sterol at a concentration of between 0.25 μmol/kg and 25 μmol/kg, inclusive of the endpoints. In certain embodiments of this method, the T cell expansion composition further comprises one or more of octanoic acid at a concentration of about 64 μmol/kg, palmitic acid at a concentration of about 7 μmol/kg, linoleic acid at a concentration of about 7.5 μmol/kg, oleic acid at a concentration of about 7.5 μmol/kg and a sterol at a concentration of about 2.5 μmol/kg.

[0454] In certain embodiments, the T cell expansion composition comprises one or more of human serum albumin, recombinant human insulin, human transferrin, 2-Mercaptoethanol, and an expansion supplement to produce a plurality of expanded modified T cells, wherein at least 2% of the plurality of modified T cells expresses one or more cell-surface marker(s) of a Treg cell. In certain embodiments, the T cell expansion composition comprises or further comprises one or more of octanoic acid, nicotinamide, 2,4,7,9-tetramethyl-5-decyn-4,7-diol (TMDD), diisopropyl adipate (DIPA), n-butyl-benzenesulfonamide, 1,2-benzenedicarboxylic acid, bis(2-methylpropyl) ester, palmitic acid, linoleic acid, oleic acid, stearic acid hydrazide, oleamide, a sterol and an alkane. In certain embodiments, the T cell expansion composition comprises one or more of octanoic acid, palmitic acid, linoleic acid, oleic acid and a sterol (e.g., cholesterol). In certain embodiments, the T cell expansion composition comprises one or more of octanoic acid at a concentration of between 0.9 mg/kg to 90 mg/kg, inclusive of the endpoints; palmitic acid at a concentration of between 0.2 mg/kg to 20 mg/kg, inclusive of the endpoints; linoleic acid at a concentration of between 0.2 mg/kg to 20 mg/kg, inclusive of the endpoints; oleic acid at a concentration of 0.2 mg/kg to 20 mg/kg, inclusive of the endpoints; and a sterol at a concentration of about 0.1 mg/kg to 10 mg/kg, inclusive of the endpoints (wherein mg/kg=parts per million). In certain embodiments, the T cell expansion composition comprises one or more of octanoic acid at a concentration of about 9 mg/kg, palmitic acid at a concentration of about 2 mg/kg, linoleic acid at a concentration of about 2 mg/kg, oleic acid at a concentration of about 2 mg/kg, and a sterol at a concentration of about 1 mg/kg (wherein mg/kg=parts per million). In certain embodiments, the T cell expansion composition comprises one or more of octanoic acid at a concentration of 9.19 mg/kg, palmitic acid at a concentration of 1.86 mg/kg, linoleic acid at a concentration of about 2.12 mg/kg, oleic acid at a concentration of about 2.13 mg/kg, and a sterol at a concentration of about 1.01 mg/kg (wherein mg/kg=parts per million). In certain embodiments, the T cell expansion composition comprises octanoic acid at a concentration of 9.19 mg/kg, palmitic acid at a concentration of 1.86 mg/kg, linoleic acid at a concentration of 2.12 mg/kg, oleic acid at a concentration of about 2.13 mg/kg, and a sterol at a concentration of 1.01 mg/kg (wherein mg/kg=parts per million). In certain embodiments, the T cell expansion composition comprises one or more of octanoic acid at a concentration of between 6.4 mol/kg and 640 μmol/kg, inclusive of the endpoints; palmitic acid at a concentration of between 0.7 μmol/kg and 70 μmol/kg, inclusive of the endpoints; linoleic acid at a concentration of between 0.75 μmol/kg and 75 μmol/kg, inclusive of the endpoints; oleic acid at a concentration of between 0.75 μmol/kg and 75 μmol/kg, inclusive of the endpoints; and a sterol at a concentration of between 0.25 μmol/kg and 25 μmol/kg, inclusive of the endpoints. In certain embodiments, the T cell expansion composition comprises one or more of octanoic acid at a concentration of about 64 μmol/kg, palmitic acid at a concentration of about 7 μmol/kg, linoleic acid at a concentration of about 7.5 μmol/kg, oleic acid at a concentration of about 7.5 μmol/kg and a sterol at a concentration of about 2.5 μmol/kg. In certain embodiments, the T cell expansion composition comprises one or more of octanoic acid at a concentration of about 63.75 μmol/kg, palmitic acid at a concentration of about 7.27 mol/kg, linoleic acid at a concentration of about 7.57 μmol/kg, oleic acid at a concentration of about 7.56 μmol/kg and a sterol at a concentration of about 2.61 μmol/kg. In certain embodiments, the T cell expansion composition comprises octanoic acid at a concentration of about 63.75 μmol/kg, palmitic acid at a concentration of about 7.27 μmol/kg, linoleic acid at a concentration of about 7.57 μmol/kg, oleic acid at a concentration of 7.56 μmol/kg and a sterol at a concentration of 2.61 μmol/kg.

[0455] As used herein, the terms “supplemented T cell expansion composition” or “T cell expansion composition” may be used interchangeably with a media comprising one or more of human serum albumin, recombinant human insulin, human transferrin, 2-Mercaptoethanol, and an expansion supplement at 37° C. Alternatively, or in addition, the terms “supplemented T cell expansion composition” or “T cell expansion composition” may be used interchangeably with a media comprising one or more of phosphorus, an octanoic fatty acid, a palmitic fatty acid, a linoleic fatty acid and an oleic acid. In certain embodiments, the media comprises an amount of phosphorus that is 10-fold higher than may be found in, for example, Iscove's Modified Dulbecco's Medium ((IMDM); available at ThermoFisher Scientific as Catalog number 12440053).

[0456] As used herein, the terms “supplemented T cell expansion composition” or “T cell expansion composition” may be used interchangeably with a media comprising one or more of human serum albumin, recombinant human insulin, human transferrin, 2-Mercaptoethanol, Iscove's MDM, and an expansion supplement at 37° C. Alternatively, or in addition, the terms “supplemented T cell expansion composition” or “T cell expansion composition” may be used interchangeably with a media comprising one or more of the following elements: boron, sodium, magnesium, phosphorus, potassium, and calcium. In certain embodiments, the terms “supplemented T cell expansion composition” or “T cell expansion composition” may be used interchangeably with a media comprising one or more of the following elements present in the corresponding average concentrations: boron at 3.7 mg/L, sodium at 3000 mg/L, magnesium at 18 mg/L, phosphorus at 29 mg/L, potassium at 15 mg/L and calcium at 4 mg/L.

[0457] As used herein, the terms “supplemented T cell expansion composition” or “T cell expansion composition” may be used interchangeably with a media comprising one or more of human serum albumin, recombinant human insulin, human transferrin, 2-Mercaptoethanol, and an expansion supplement at 37° C. Alternatively, or in addition, the terms “supplemented T cell expansion composition” or “T cell expansion composition” may be used interchangeably with a media comprising one or more of the following components: octanoic acid (CAS No. 124-07-2), nicotinamide (CAS No. 98-92-0), 2,4,7,9-tetramethyl-5-decyn-4,7-diol (TMDD) (CAS No. 126-86-3), diisopropyl adipate (DIPA) (CAS No. 6938-94-9), n-butyl-benzenesulfonamide (CAS No. 3622-84-2), 1,2-benzenedicarboxylic acid, bis(2-methylpropyl) ester (CAS No. 84-69-5), palmitic acid (CAS No. 57-10-3), linoleic acid (CAS No. 60-33-3), oleic acid (CAS No. 112-80-1), stearic acid hydrazide (CAS No. 4130-54-5), oleamide (CAS No. 3322-62-1), sterol (e.g., cholesterol) (CAS No. 57-88-5), and alkanes (e.g., nonadecane) (CAS No. 629-92-5). In certain embodiments, the terms “supplemented T cell expansion composition” or “T cell expansion composition” may be used interchangeably with a media comprising one or more of the following components: octanoic acid (CAS No. 124-07-2), nicotinamide (CAS No. 98-92-0), 2,4,7,9-tetramethyl-5-decyn-4,7-diol (TMDD) (CAS No. 126-86-3), diisopropyl adipate (DIPA) (CAS No. 6938-94-9), n-butyl-benzenesulfonamide (CAS No. 3622-84-2), 1,2-benzenedicarboxylic acid, bis(2-methylpropyl) ester (CAS No. 84-69-5), palmitic acid (CAS No. 57-10-3), linoleic acid (CAS No. 60-33-3), oleic acid (CAS No. 112-80-1), stearic acid hydrazide (CAS No. 4130-54-5), oleamide (CAS No. 3322-62-1), sterol (e.g., cholesterol) (CAS No. 57-88-5), alkanes (e.g., nonadecane) (CAS No. 629-92-5), and phenol red (CAS No. 143-74-8). In certain embodiments, the terms “supplemented T cell expansion composition” or “T cell expansion composition” may be used interchangeably with a media comprising one or more of the following components: octanoic acid (CAS No. 124-07-2), nicotinamide (CAS No. 98-92-0), 2,4,7,9-tetramethyl-5-decyn-4,7-diol (TMDD) (CAS No. 126-86-3), diisopropyl adipate (DIPA) (CAS No. 6938-94-9), n-butyl-benzenesulfonamide (CAS No. 3622-84-2), 1,2-benzenedicarboxylic acid, bis(2-methylpropyl) ester (CAS No. 84-69-5), palmitic acid (CAS No. 57-10-3), linoleic acid (CAS No. 60-33-3), oleic acid (CAS No. 112-80-1), stearic acid hydrazide (CAS No. 4130-54-5), oleamide (CAS No. 3322-62-1), phenol red (CAS No. 143-74-8) and lanolin alcohol.

[0458] In certain embodiments, the terms “supplemented T cell expansion composition” or “T cell expansion composition” may be used interchangeably with a media comprising one or more of human serum albumin, recombinant human insulin, human transferrin, 2-Mercaptoethanol, and an expansion supplement at 37° C. Alternatively, or in addition, the terms “supplemented T cell expansion composition” or “T cell expansion composition” may be used interchangeably with a media comprising one or more of the following ions: sodium, ammonium, potassium, magnesium, calcium, chloride, sulfate and phosphate.

[0459] As used herein, the terms “supplemented T cell expansion composition” or “T cell expansion composition” may be used interchangeably with a media comprising one or more of human serum albumin, recombinant human insulin, human transferrin, 2-Mercaptoethanol, and an expansion supplement at 37° C. Alternatively, or in addition, the terms “supplemented T cell expansion composition” or “T cell expansion composition” may be used interchangeably with a media comprising one or more of the following free amino acids: histidine, asparagine, serine, glutamate, arginine, glycine, aspartic acid, glutamic acid, threonine, alanine, proline, cysteine, lysine, tyrosine, methionine, valine, isoleucine, leucine, phenylalanine and tryptophan. In certain embodiments, the terms “supplemented T cell expansion composition” or “T cell expansion composition” may be used interchangeably with a media comprising one or more of the following free amino acids in the corresponding average mole percentages: histidine (about 1%), asparagine (about 0.5%), serine (about 1.5%), glutamine (about 67%), arginine (about 1.5%), glycine (about 1.5%), aspartic acid (about 1%), glutamic acid (about 2%), threonine (about 2%), alanine (about 1%), proline (about 1.5%), cysteine (about 1.5%), lysine (about 3%), tyrosine (about 1.5%), methionine (about 1%), valine (about 3.5%), isoleucine (about 3%), leucine (about 3.5%), phenylalanine (about 1.5%) and tryptophan (about 0.5%). In certain embodiments, the terms “supplemented T cell expansion composition” or “T cell expansion composition” may be used interchangeably with a media comprising one or more of the following free amino acids in the corresponding average mole percentages: histidine (about 0.78%), asparagine (about 0.4%), serine (about 1.6%), glutamine (about 67.01%), arginine (about 1.67%), glycine (about 1.72%), aspartic acid (about 1.00%), glutamic acid (about 1.93%), threonine (about 2.38%), alanine (about 1.11%), proline (about 1.49%), cysteine (about 1.65%), lysine (about 2.84%), tyrosine (about 1.62%), methionine (about 0.85%), valine (about 3.45%), isoleucine (about 3.14%), leucine (about 3.3%), phenylalanine (about 1.64%) and tryptophan (about 0.37%).

[0460] As used herein, the terms “supplemented T cell expansion composition” or “T cell expansion composition” may be used interchangeably with a media comprising one or more of human serum albumin, recombinant human insulin, human transferrin, 2-Mercaptoethanol, Iscove's MDM, and an expansion supplement at 37° C. Alternatively, or in addition, the terms “supplemented T cell expansion composition” or “T cell expansion composition” may be used interchangeably with a media comprising one or more of phosphorus, an octanoic fatty acid, a palmitic fatty acid, a linoleic fatty acid and an oleic acid. In certain embodiments, the media comprises an amount of phosphorus that is 10-fold higher than may be found in, for example, Iscove's Modified Dulbecco's Medium ((IMDM); available at ThermoFisher Scientific as Catalog number 12440053).

[0461] In certain embodiments, the terms “supplemented T cell expansion composition” or “T cell expansion composition” may be used interchangeably with a media comprising one or more of octanoic acid, palmitic acid, linoleic acid, oleic acid and a sterol (e.g., cholesterol). In certain embodiments, the terms “supplemented T cell expansion composition” or “T cell expansion composition” may be used interchangeably with a media comprising one or more of octanoic acid at a concentration of between 0.9 mg/kg to 90 mg/kg, inclusive of the endpoints; palmitic acid at a concentration of between 0.2 mg/kg to 20 mg/kg, inclusive of the endpoints; linoleic acid at a concentration of between 0.2 mg/kg to 20 mg/kg, inclusive of the endpoints; oleic acid at a concentration of 0.2 mg/kg to 20 mg/kg, inclusive of the endpoints; and a sterol at a concentration of about 0.1 mg/kg to 10 mg/kg, inclusive of the endpoints (wherein mg/kg=parts per million). In certain embodiments, the terms “supplemented T cell expansion composition” or “T cell expansion composition” may be used interchangeably with a media comprising one or more of octanoic acid at a concentration of about 9 mg/kg, palmitic acid at a concentration of about 2 mg/kg, linoleic acid at a concentration of about 2 mg/kg, oleic acid at a concentration of about 2 mg/kg, and a sterol at a concentration of about 1 mg/kg (wherein mg/kg=parts per million). In certain embodiments, the terms “supplemented T cell expansion composition” or “T cell expansion composition” may be used interchangeably with a media comprising one or more of octanoic acid at a concentration of 9.19 mg/kg, palmitic acid at a concentration of 1.86 mg/kg, linoleic acid at a concentration of about 2.12 mg/kg, oleic acid at a concentration of about 2.13 mg/kg, and a sterol at a concentration of about 1.01 mg/kg (wherein mg/kg=parts per million). In certain embodiments, the terms “supplemented T cell expansion composition” or “T cell expansion composition” may be used interchangeably with a media comprising one or more of octanoic acid at a concentration of 9.19 mg/kg, palmitic acid at a concentration of 1.86 mg/kg, linoleic acid at a concentration of 2.12 mg/kg, oleic acid at a concentration of about 2.13 mg/kg, and a sterol at a concentration of 1.01 mg/kg (wherein mg/kg=parts per million). In certain embodiments, the terms “supplemented T cell expansion composition” or “T cell expansion composition” may be used interchangeably with a media comprising one or more of octanoic acid at a concentration of between 6.4 μmol/kg and 640 μmol/kg, inclusive of the endpoints; palmitic acid at a concentration of between 0.7 μmol/kg and 70 μmol/kg, inclusive of the endpoints; linoleic acid at a concentration of between 0.75 μmol/kg and 75 μmol/kg, inclusive of the endpoints; oleic acid at a concentration of between 0.75 μmol/kg and 75 μmol/kg, inclusive of the endpoints; and a sterol at a concentration of between 0.25 μmol/kg and 25 μmol/kg, inclusive of the endpoints. In certain embodiments, the terms “supplemented T cell expansion composition” or “T cell expansion composition” may be used interchangeably with a media comprising one or more of octanoic acid at a concentration of about 64 μmol/kg, palmitic acid at a concentration of about 7 μmol/kg, linoleic acid at a concentration of about 7.5 μmol/kg, oleic acid at a concentration of about 7.5 μmol/kg and a sterol at a concentration of about 2.5 μmol/kg.

[0462] In certain embodiments, the terms “supplemented T cell expansion composition” or “T cell expansion composition” may be used interchangeably with a media comprising one or more of octanoic acid at a concentration of about 63.75 μmol/kg, palmitic acid at a concentration of about 7.27 μmol/kg, linoleic acid at a concentration of about 7.57 μmol/kg, oleic acid at a concentration of about 7.56 μmol/kg and a sterol at a concentration of about 2.61 μmol/kg. In certain embodiments, the terms “supplemented T cell expansion composition” or “T cell expansion composition” may be used interchangeably with a media comprising one or more of octanoic acid at a concentration of about 63.75 μmol/kg, palmitic acid at a concentration of about 7.27 μmol/kg, linoleic acid at a concentration of about 7.57 mol/kg, oleic acid at a concentration of 7.56 μmol/kg and a sterol at a concentration of 2.61 μmol/kg.

[0463] In certain embodiments of the methods of producing a modified T cell (e.g., a Treg cell or a Teff cell) of the disclosure, the method comprises contacting a modified T cell and an inhibitor of the P13K-Akt-mTOR pathway. Modified T cells of the disclosure, including modified Treg cells or Teff cells of the disclosure, may be incubated, cultured, grown, stored, or otherwise, combined at any step in the methods of the procedure with a growth medium comprising one or more inhibitors a component of a PI3K pathway. Exemplary inhibitors a component of a PI3K pathway include, but are not limited to, an inhibitor of GSK3β such as TWS119 (also known as GSK 3B inhibitor XII; CAS Number 601514-19-6 having a chemical formula C₁₈H₁₄N₄O₂). Exemplary inhibitors of a component of a PI3K pathway include, but are not limited to, bb007 (BLUEBIRDBIO™). Additional Exemplary inhibitors of a component of a PI3K pathway include, but are not limited to, an allosteric Akt inhibitor VIII (also referred to as Akti-1/2 having Compound number 10196499), ATP competitive inhibitors (Orthosteric inhibitors targeting the ATP-binding pocket of the protein kinase B (Akt)), Isoquinoline-5-sulfonamides (H-8, H-89, and NL-71-101), Azepane derivatives (A series of structures derived from (—)—balanol), Aminofurazans (GSK690693), Heterocyclic rings (7-azaindole, 6-phenylpurine derivatives, pyrrolo[2,3-d]pyrimidine derivatives, CCT128930, 3-aminopyrrolidine, anilinotriazole derivatives, spiroindoline derivatives, AZD5363, ipatasertib (GDC-0068, RG7440), A-674563, and A-443654), Phenylpyrazole derivatives (AT7867 and AT13148), Thiophenecarboxamide derivatives (Afuresertib (GSK2110183), 2-pyrimidyl-5-amidothiophene derivative (DC120), uprosertib (GSK2141795)), Allosteric inhibitors (Superior to orthosteric inhibitors providing greater specificity, reduced side-effects and less toxicity), 2,3-diphenylquinoxaline analogues (2,3-diphenylquinoxaline derivatives, triazolo[3,4-f][1,6]naphthyridin-3(2H)-one derivative (MK-2206)), Alkylphospholipids (Edelfosine (1-O-octadecyl-2-O-methyl-rac-glycero-3-phosphocholine, ET-18—OCH₃) ilmofosine (BM 41.440), miltefosine (hexadecylphosphocholine, HePC), perifosine (D-21266), erucylphosphocholine (ErPC), erufosine (ErPC3, erucylphosphohomocholine), Indole-3-carbinol analogues (Indole-3-carbinol, 3-chloroacetylindole, diindolylmethane, diethyl 6-methoxy-5,7-dihydroindolo [2,3-b]carbazole-2,10-dicarboxylate (SR13668), OSU-A9), Sulfonamide derivatives (PH-316 and PHT-427), Thiourea derivatives (PIT-1, PIT-2, DM-PIT-1, N-[(1-methyl-1H-pyrazol-4-yl)carbonyl]-N′-(3-bromophenyl)-thiourea), Purine derivatives (Triciribine (TCN, NSC 154020), triciribine mono-phosphate active analogue (TCN-P), 4-amino-pyrido[2,3-d]pyrimidine derivative API-1, 3-phenyl-3H-imidazo[4,5-b]pyridine derivatives, ARQ 092), BAY 1125976, 3-methyl-xanthine, quinoline-4-carboxamide and 2-[4-(cyclohexa-1,3-dien-1-yl)-1H-pyrazol-3-yl]phenol, 3-oxo-tirucallic acid, 3α- and 3β-acetoxy-tirucallic acids, acetoxy-tirucallic acid, and irreversible inhibitors (antibiotics, Lactoquinomycin, Frenolicin B, kalafungin, medermycin, Boc-Phe-vinyl ketone, 4-hydroxynonenal (4-FINE), 1,6-naphthyridinone derivatives, and imidazo-1,2-pyridine derivatives).

[0464] In certain embodiments of the methods of producing a modified T cell (e.g., a Treg cell or a Teff cell) of the disclosure, the method comprises contacting a modified T cell and an inhibitor of T cell effector differentiation. Exemplary inhibitors of T cell effector differentiation include, but are not limited to, a BET inhibitor (e.g., JQ1, a hienotriazolodiazepine) and/or an inhibitor of the BET family of proteins (e.g., BRD2, BRD3, BRD4, and BRDT).

[0465] In certain embodiments of the methods of producing a modified T cell (e.g., a Treg cell or a Teff cell) of the disclosure, the method comprises contacting a modified T cell and an agent that reduces nucleo-cytoplasmic Acetyl-CoA. Exemplary agents that reduce nucleo-cytoplasmic Acetyl-CoA include, but are not limited to, 2-hydroxy-citrate (2-HC) as well as agents that increase expression of Acss1.

[0466] In certain embodiments of the methods of producing a modified T cell (e.g., a Treg cell or a Teff cell) of the disclosure, the method comprises contacting a modified T cell and a composition comprising a histone deacetylase (HDAC) inhibitor. In some embodiments, the composition comprising an HDAC inhibitor comprises or consists of valproic acid, Sodium Phenylbutyrate (NaPB) or a combination thereof. In some embodiments, the composition comprising an HDAC inhibitor comprises or consists of valproic acid. In some embodiments, the composition comprising an HDAC inhibitor comprises or consists of Sodium Phenylbutyrate (NaPB).

[0467] In certain embodiments of the methods of producing a modified T cell (e.g., a Treg cell or a Teff cell) of the disclosure, the activation supplement may comprise one or more cytokine(s). The one or more cytokine(s) may comprise any cytokine, including but not limited to, lymphokines. Exemplary lympokines include, but are not limited to, interleukin-2 (IL-2), interleukin-3 (IL-3), interleukin-4 (IL-4), interleukin-5 (IL-5), interleukin-6 (IL-6), interleukin-7 (IL-7), interleukin-15 (IL-15), interleukin-21 (IL-21), granulocyte-macrophage colony-stimulating factor (GM-CSF) and interferon-gamma (INFγ). The one or more cytokine(s) may comprise IL-2.

[0468] In certain embodiments of the methods of producing a modified T cell (e.g., a Treg cell or a Teff cell) of the disclosure, the activation supplement may comprise one or more activator complexes. Exemplary and nonlimiting activator complexes may comprise a monomeric, dimeric, trimeric or tetrameric antibody complex that binds one or more of CD3, CD28, and CD2. In some embodiments, the activation supplement comprises or consists of an activator complex that comprises a human, a humanized or a recombinant or a chimeric antibody. In some embodiments, the activation supplement comprises or consists of an activator complex that binds CD3 and CD28. In some embodiments, the activation supplement comprises or consists of an activator complex that binds CD3, CD28 and CD2.

[0469] Methods of Expressing a Chimeric Stimulatory Receptor

[0470] The disclosure provides methods of expressing a CSR on the surface of a cell. The method comprises (a) obtaining a cell population; (b) contacting the cell population to a composition comprising a CSR or a sequence encoding the CSR, under conditions sufficient to transfer the CSR across a cell membrane of at least one cell in the cell population, thereby generating a modified cell population; (c) culturing the modified cell population under conditions suitable for integration of the sequence encoding the CSR; and (d) expanding and/or selecting at least one cell from the modified cell population that express the CSR on the cell surface.

[0471] In some aspects, the cell population can comprise leukocytes and/or CD4+ and CD8+ leukocytes. The cell population can comprise CD4+ and CD8+ leukocytes in an optimized ratio. The optimized ratio of CD4+ to CD8+ leukocytes does not naturally occur in vivo. The cell population can comprise a tumor cell.

[0472] In some aspects, the conditions sufficient to transfer the CSR or the sequence encoding the CSR, transposon, or vector across a cell membrane of at least one cell in the cell population comprises at least one of an application of one or more pulses of electricity at a specified voltage, a buffer, and one or more supplemental factor(s). In some aspects, the conditions suitable for integration of the sequence encoding the CSR comprise at least one of a buffer and one or more supplemental factor(s).

[0473] The buffer can comprise PBS, HBSS, OptiMEM, BTXpress, Amaxa Nucleofector, Human T cell nucleofection buffer or any combination thereof. The one or more supplemental factor(s) can comprise (a) a recombinant human cytokine, a chemokine, an interleukin or any combination thereof; (b) a salt, a mineral, a metabolite or any combination thereof; (c) a cell medium; (d) an inhibitor of cellular DNA sensing, metabolism, differentiation, signal transduction, one or more apoptotic pathway(s) or combinations thereof; and (e) a reagent that modifies or stabilizes one or more nucleic acids. The recombinant human cytokine, the chemokine, the interleukin or any combination thereof can comprise IL2, IL7, IL12, IL15, IL21, ILL IL3, IL4, IL5, IL6, IL8, CXCL8, IL9, IL10, IL11, IL13, IL14, IL16, IL17, IL18, IL19, IL20, IL22, IL23, IL25, IL26, IL27, IL28, IL29, IL30, IL31, IL32, IL33, IL35, IL36, GM-CSF, IFN-gamma, IL-1 alpha/IL-1F1, IL-1 beta/IL-1F2, IL-12 p′70, IL-12/IL-35 p35, IL-13, IL-17/IL-17A, IL-17A/F Heterodimer, IL-17F, IL-18/IL-1F4, IL-23, IL-24, IL-32, IL-32 beta, IL-32 gamma, IL-33, LAP (TGF-beta 1), Lymphotoxin-alpha/TNF-beta, TGF-beta, TNF-alpha, TRANCE/TNFSF11/RANK L or any combination thereof. The salt, the mineral, the metabolite or any combination thereof can comprise HEPES, Nicotinamide, Heparin, Sodium Pyruvate, L-Glutamine, MEM Non-Essential Amino Acid Solution, Ascorbic Acid, Nucleosides, FBS/FCS, Human serum, serum-substitute, antibiotics, pH adjusters, Earle's Salts, 2-Mercaptoethanol, Human transferrin, Recombinant human insulin, Human serum albumin, Nucleofector PLUS Supplement, KCL, MgCl₂, Na₂HPO₄, NAH₂PO₄, Sodium lactobionate, Mannitol, Sodium succinate, Sodium Chloride, CINa, Glucose, Ca(NO₃)₂, Tris/HCl, K₂HPO₄, KH₂PO₄, Polyethylenimine, Poly-ethylene-glycol, Poloxamer 188, Poloxamer 181, Poloxamer 407, Poly-vinylpyrrolidone, Pop313, Crown-5, or any combination thereof. The cell medium can comprise PBS, HBSS, OptiMEM, DMEM, RPMI 1640, AIM-V, X—VIVO 15, CellGro DC Medium, CTS OpTimizer T Cell Expansion SFM, TexMACS Medium, PRIME-XV T Cell Expansion Medium, ImmunoCult-XF T Cell Expansion Medium or any combination thereof. The inhibitor of cellular DNA sensing, metabolism, differentiation, signal transduction, one or more apoptotic pathway(s) or combinations thereof comprise inhibitors of TLR9, MyD88, IRAK, TRAF6, TRAF3, IRF-7, NF-KB, Type 1 Interferons, pro-inflammatory cytokines, cGAS, STING, Sec5, TBK1, IRF-3, RNA pol III, RIG-1, IPS-1, FADD, RIP1, TRAF3, AIM2, ASC, Caspasel, Pro-IL1B, PI3K, Akt, Wnt3A, inhibitors of glycogen synthase kinase-3β (GSK-3β) (e.g. TWS119), or any combination thereof. Examples of such inhibitors can include Bafilomycin, Chloroquine, Quinacrine, AC-YVAD-CMK, Z-VAD-FMK, Z-IETD-FMK or any combination thereof. The reagent that modifies or stabilizes one or more nucleic acids comprises a pH modifier, a DNA-binding protein, a lipid, a phospholipid, CaPO4, a net neutral charge DNA binding peptide with or without a NLS sequence, a TREX1 enzyme or any combination thereof.

[0474] The expansion and selection steps can occur concurrently or sequentially. The expansion can occur prior to selection. The expansion can occur following selection, and, optionally, a further (i.e. second) selection can occur following expansion. Concurrent expansion and selection can be simultaneous. The expansion and/or selection steps can proceed for a period of 10 to 14 days, inclusive of the endpoints.

[0475] The expansion can comprise contacting at least one cell of the modified cell population with an antigen to stimulate the at least one cell through the CSR, thereby generating an expanded cell population. The antigen can be presented on the surface of a substrate. The substrate can have any form, including, but not limited to a surface, a well, a bead or a plurality thereof, and a matrix. The substrate can further comprise a paramagnetic or magnetic component. The antigen can be presented on the surface of a substrate, wherein the substrate is a magnetic bead, and wherein a magnet can be used to remove or separate the magnetic beads from the modified and expanded cell population. The antigen can be presented on the surface of a cell or an artificial antigen presenting cell. Artificial antigen presenting cells can include, but are not limited to, tumor cells and stem cells.

[0476] In some aspects wherein the transposon or vector comprises a selection gene, the selection step comprises contacting at least one cell of the modified cell population with a compound to which the selection gene confers resistance, thereby identifying a cell expressing the selection gene as surviving the selection and identifying a cell failing to express the selection gene as failing to survive the selection step.

[0477] The disclosure provides a composition comprising the modified, expanded and selected cell population of the methods described herein.

[0478] A more detailed description of methods for expressing a CSR or a CAR on the surface of a cell is disclosed in PCT Publication No. WO 2019/049816 and PCT/US2019/049816.

[0479] The present disclosure provides a cell or a population of cells wherein the cell comprises a composition comprising (a) an inducible transgene construct, comprising a sequence encoding an inducible promoter and a sequence encoding a transgene, and (b) a receptor construct, comprising a sequence encoding a constitutive promoter and a sequence encoding an exogenous receptor, such as a CSR, wherein, upon integration of the construct of (a) and the construct of (b) into a genomic sequence of a cell, the exogenous receptor is expressed, and wherein the exogenous receptor, upon binding a ligand or antigen, transduces an intracellular signal that targets directly or indirectly the inducible promoter regulating expression of the inducible transgene (a) to modify gene expression.

[0480] The composition can modify gene expression by decreasing gene expression. The composition can modify gene expression by transiently modifying gene expression (e.g., for the duration of binding of the ligand to the exogenous receptor). The composition can modify gene expression acutely (e.g., the ligand reversibly binds to the exogenous receptor). The composition can modify gene expression chronically (e.g., the ligand irreversibly binds to the exogenous receptor).

[0481] The exogenous receptor can comprise an endogenous receptor with respect to the genomic sequence of the cell. Exemplary receptors include, but are not limited to, intracellular receptors, cell-surface receptors, transmembrane receptors, ligand-gated ion channels, and G-protein coupled receptors.

[0482] The exogenous receptor can comprise a non-naturally occurring receptor. The non-naturally occurring receptor can be a synthetic, modified, recombinant, mutant or chimeric receptor. The non-naturally occurring receptor can comprise one or more sequences isolated or derived from a T-cell receptor (TCR). The non-naturally occurring receptor can comprise one or more sequences isolated or derived from a scaffold protein. In some aspects, including those wherein the non-naturally occurring receptor does not comprise a transmembrane domain, the non-naturally occurring receptor interacts with a second transmembrane, membrane-bound and/or an intracellular receptor that, following contact with the non-naturally occurring receptor, transduces an intracellular signal. The non-naturally occurring receptor can comprise a transmembrane domain. The non-naturally occurring receptor can interact with an intracellular receptor that transduces an intracellular signal. The non-naturally occurring receptor can comprise an intracellular signaling domain. The non-naturally occurring receptor can be a chimeric ligand receptor (CLR). The CLR can be a chimeric antigen receptor (CSR).

[0483] The sequence encoding the inducible promoter of comprises a sequence encoding an NFκB promoter, a sequence encoding an interferon (IFN) promoter or a sequence encoding an interleukin-2 promoter. In some aspects, the IFN promoter is an IFNγ promoter. The inducible promoter can be isolated or derived from the promoter of a cytokine or a chemokine. The cytokine or chemokine can comprise IL2, IL3, IL4, IL5, IL6, IL10, IL12, IL13, IL17A/F, IL21, IL22, IL23, transforming growth factor beta (TGF(3), colony stimulating factor 2 (GM-CSF), interferon gamma (IFNγ), Tumor necrosis factor alpha (TNFα), LTα, perforin, Granzyme C (Gzmc), Granzyme B (Gzmb), C—C motif chemokine ligand 5 (CCL5), C—C motif chemokine ligand 4 (Cc14), C—C motif chemokine ligand 3 (Cc13), X—C motif chemokine ligand 1 (Xcl1) or LIF interleukin 6 family cytokine (Lif).

[0484] The inducible promoter can be isolated or derived from the promoter of a gene comprising a surface protein involved in cell differentiation, activation, exhaustion and function. In some aspects, the gene comprises CD69, CD71, CTLA4, PD-1, TIGIT, LAG3, TIM-3, GITR, MHCII, COX-2, FASL or 4-1BB.

[0485] The inducible promoter can be isolated or derived from the promoter of a gene involved in CD metabolism and differentiation. The inducible promoter can be isolated or derived from the promoter of Nr4a1, Nr4a3, Tnfrsf9 (4-1BB), Sema7α, Zfp3612, Gadd45b, Dusp5, Dusp6 and Neto2.

[0486] In some aspects, the inducible transgene construct comprises or drives expression of a signaling component downstream of an inhibitory checkpoint signal, a transcription factor, a cytokine or a cytokine receptor, a chemokine or a chemokine receptor, a cell death or apoptosis receptor/ligand, a metabolic sensing molecule, a protein conferring sensitivity to a cancer therapy, and an oncogene or a tumor suppressor gene. Non-limiting examples of which are disclosed in PCT Publication No. WO 2019/173636 and PCT Application No. PCT/US2019/049816.

[0487] The present disclosure provides a method of producing a population of modified T-cells comprising, consisting essential of, or consisting of introducing into a plurality of primary human T-cells a composition comprising the CSR of the present disclosure or a sequence encoding the same to produce a plurality of modified T-cells. The present disclosure provides a composition comprising a population of modified T-cells produced by the method. In some aspects, at least 5%, at least 10%, at least 15%, at least 20%, at least 25%, at least 30%, at least 35%, at least 40%, at least 45%, at least 50%, at least 55%, at least 60%, at least 65%, at least 70%, at least 75%, at least 80%, at least 85%, at least 90%, at least 95%, at least 96%, at least 97%, at least 98%, at least 99%, or 100% of the population expresses the CSR of the present disclosure.

### Chimeric Antigen Receptors

[0488] In some embodiments of the compositions and methods of the disclosure, a modified Treg or Teff cell comprising a CSR of the disclosure can further comprise a chimeric antigen receptor.

[0489] In some embodiments of the compositions and methods of the disclosure, a transposon comprises a sequence encoding a chimeric antigen receptor or a portion thereof.

[0490] Chimeric antigen receptors (CARs) of the disclosure may comprise (a) an ectodomain comprising an antigen recognition region, (b) a transmembrane domain, and (c) an endodomain comprising at least one costimulatory domain. In certain embodiments, the ectodomain may further comprise a signal peptide. Alternatively, or in addition, in certain embodiments, the ectodomain may further comprise a hinge between the antigen recognition region and the transmembrane domain. In certain embodiments of the CARs of the disclosure, the signal peptide may comprise a sequence encoding a human CD2, CD3δ, CD3ε, CD3γ, CD3ζ, CD4, CD8α, CD19, CD28, 4-1BB or GM-CSFR signal peptide. In certain embodiments of the CARs of the disclosure, the signal peptide may comprise a sequence encoding a human CD8a signal peptide. In certain embodiments, the transmembrane domain may comprise a sequence encoding a human CD2, CD3δ, CD3ε, CD3γ, CD3ζ, CD4, CD8α, CD19, CD28, 4-1BB or GM-CSFR transmembrane domain. In certain embodiments of the CARs of the disclosure, the transmembrane domain may comprise a sequence encoding a human CD8a transmembrane domain. In certain embodiments of the CARs of the disclosure, the endodomain may comprise a human CD3t endodomain.

[0491] In certain embodiments of the CARs of the disclosure, the at least one costimulatory domain may comprise a human 4-1BB, CD28, CD40, ICOS, MyD88, OX-40 intracellular segment, or any combination thereof. In certain embodiments of the CARs of the disclosure, the at least one costimulatory domain may comprise a CD28 and/or a 4-1BB costimulatory domain. In certain embodiments of the CARs of the disclosure, the hinge may comprise a sequence derived from a human CD8α, IgG4, and/or CD4 sequence. In certain embodiments of the CARs of the disclosure, the hinge may comprise a sequence derived from a human CD8a sequence.

[0492] The CD28 costimulatory domain may comprise an amino acid sequence comprising RVKFSRSADAPAYKQGQNQLYNELNLGRREEYDVLDKRRGRDPEMGGKPRRKNPQ EGLYNELQKDKMAEAYSEIGMKGERRRGKGHDGLYQGLS TATKDTYDALHMQALP PR (SEQ ID NO: 212) or a sequence having at least 70%, 80%, 90%, 95%, or 99% identity to the amino acid sequence comprising RVKFSRSADAPAYKQGQNQLYNELNLGRREEYDVLDKRRGRDPEMGGKPRRKNPQ EGLYNELQKDKMAEAYSEIGMKGERRRGKGHDGLYQGLS TATKDTYDALHMQALP PR (SEQ ID NO: 212). The CD28 costimulatory domain may be encoded by the nucleic acid sequence comprising cgcgtgaagtttagtcgatcagcagatgccccagatacaaacagggacagaaccagctgtataacgagctgaatctgggccgccga gaggaatatgacgtgctggataageggagaggacgcgaccccgaaatgggaggcaagcccaggcgcaaaaaccctcaggaagg cctgtataacgagctgcagaaggacaaaatggcagaagcctattctgagatcggcatgaagggggagcgacggagaggcaaagg gcacgatgggctgtaccagggactgagcaccgccacaaaggacacctatgatgctctgcatatgcaggcactgcctccaagg (SEQ ID NO: 213). The 4-1BB costimulatory domain may comprise an amino acid sequence comprising KRGRKKLLYIFKQPFMRPVQTTQEEDGCSCRFPEEEEGGCEL (SEQ ID NO: 214) or a sequence having at least 70%, 80%, 90%, 95%, or 99% identity to the amino acid sequence comprising KRGRKKLLYIFKQPFMRPVQTTQEEDGCSCRFPEEEEGGCEL (SEQ ID NO: 214). The 4-1BB costimulatory domain may be encoded by the nucleic acid sequence comprising aagagaggcaggaagaaactgctgtatattricaaacagccatcatgcgccccgtgcagactacccaggaggaagacgggtgctcc tgtcgattccctgaggaagaggaaggcgggtgtgagctg (SEQ ID NO: 215). The 4-1BB costimulatory domain may be located between the transmembrane domain and the CD28 costimulatory domain.

[0493] In certain embodiments of the CARs of the disclosure, the hinge may comprise a sequence derived from a human CD8α, IgG4, and/or CD4 sequence. In certain embodiments of the CARs of the disclosure, the hinge may comprise a sequence derived from a human CD8α sequence. The hinge may comprise a human CD8α amino acid sequence comprising TTTPAPRPPTPAPTIASQPLSLRPEACRPAAGGAVHTRGLDFACD (SEQ ID NO: 216) or a sequence having at least 70%, 80%, 90%, 95%, or 99% identity to the amino acid sequence comprising TTTPAPRPPTPAPTIASQPLSLRPEACRPAAGGAVHTRGLDFACD (SEQ ID NO: 216). The human CD8α hinge amino acid sequence may be encoded by the nucleic acid sequence comprising actaccacaccagcacctagaccaccaactccagctccaaccatcgcgagtcagcccctgagtctgagacctgaggcctgcaggcc agctgcaggaggagctgtgcacaccaggggcctggacttcgcctgcgac (SEQ ID NO: 217).

[0494] Non-limiting examples of antigen recognition regions include scFvs, centyrins, VH, VHH, single domain antibodies, antibody mimetics, and monobodies, described in more detail in PCT Publication No. WO 2019/173636 and PCT/US2019/049816, which is incorporated by reference herein in its entirety.

[0495] Armored Cells

[0496] The modified cells of disclosure (e.g., CSR-T cells or CAR T-cells) can be further modified to enhance their therapeutic potential. Alternatively, or in addition, the modified cells may be further modified to render them less sensitive to immunologic and/or metabolic checkpoints. Modifications of this type “armor” the cells, which, following the modification, may be referred to here as “armored” cells (e.g., armored T-cells). Armored cells may be produced by, for example, blocking and/or diluting specific checkpoint signals delivered to the cells (e.g., checkpoint inhibition) naturally, within the tumor immunosuppressive microenvironment.

[0497] An armored cell of the disclosure can be derived from any cell, for example, a T cell, a NK cell, a hematopoietic progenitor cell, a peripheral blood (PB) derived T cell (including a T cell isolated or derived from G-CSF-mobilized peripheral blood), or an umbilical cord blood (UCB) derived T cell. An armored cell (e.g., armored T-cell) can comprise one or more of a chimeric ligand receptor (CLR comprising a protein scaffold, an antibody, an ScFv, or an antibody mimetic)/chimeric antigen receptor (CAR comprising a protein scaffold, an antibody, an ScFv, or an antibody mimetic), a CARTyrin (a CAR comprising a Centyrin), and/or a VCAR (a CAR comprising a camelid VHH or a single domain VH). An armored cell (e.g., armored T-cell) can comprise an inducible proapoptotic polypeptide as disclosed herein. An armored cell (e.g., armored T-cell) can comprise an exogenous sequence. The exogenous sequence can comprise a sequence encoding a therapeutic protein. Exemplary therapeutic proteins may be nuclear, cytoplasmic, intracellular, transmembrane, cell-surface bound, or secreted proteins. Exemplary therapeutic proteins expressed by the armored cell (e.g., armored T-cell) may modify an activity of the armored cell or may modify an activity of a second cell. An armored cell (e.g., armored T-cell) can comprise a selection gene or a selection marker. An armored cell (e.g., armored T-cell) can comprise a synthetic gene expression cassette (also referred to herein as an inducible transgene construct).

[0498] The modified cells of disclosure (e.g., CSR-T cells or CAR T-cells) can be further modified to silence or reduce expression one or more gene(s) encoding receptor(s) of inhibitory checkpoint signals to produce an armored cell (e.g., armored CAR T-cell). Receptors of inhibitory checkpoint signals are expressed on the cell surface or within the cytoplasm of a cell. Silencing or reducing expressing of the gene encoding the receptor of the inhibitory checkpoint signal results a loss of protein expression of the inhibitory checkpoint receptors on the surface or within the cytoplasm of an armored cell. Thus, armored cells having silenced or reduced expression of one or more genes encoding an inhibitory checkpoint receptor is resistant, non-receptive or insensitive to checkpoint signals. The resistance or decreased sensitivity of the armored cell to inhibitory checkpoint signals enhances the therapeutic potential of the armored cell in the presence of these inhibitory checkpoint signals. Non-limiting examples of inhibitory checkpoint signals (and proteins that induce immunosuppression) are disclosed in PCT Publication No. WO 2019/173636. Preferred examples of inhibitory checkpoint signals that may be silenced include, but are not limited to, PD-1 and TGFβRII.

[0499] The modified cells of disclosure (e.g., e.g., CSR-T cells or CAR T-cells) can be further modified to silence or reduce expression of one or more gene(s) encoding intracellular proteins involved in checkpoint signaling to produce an armored cell (e.g., armored CAR T-cell). The activity of the modified cells may be enhanced by targeting any intracellular signaling protein involved in a checkpoint signaling pathway, thereby achieving checkpoint inhibition or interference to one or more checkpoint pathways. Non-limiting examples of intracellular signaling proteins involved in checkpoint signaling are disclosed in PCT Publication No. WO 2019/173636.

[0500] The modified cells of disclosure (e.g., CSR-T cells or CAR T-cells) can be further modified to silence or reduce expression of one or more gene(s) encoding a transcription factor that hinders the efficacy of a therapy to produce an armored cell (e.g., armored CAR T-cell). The activity of modified cells may be enhanced or modulated by silencing or reducing expression (or repressing a function) of a transcription factor that hinders the efficacy of a therapy. Non-limiting examples of transcription factors that may be modified to silence or reduce expression or to repress a function thereof include, but are not limited to, the exemplary transcription factors are disclosed in PCT Publication No. WO 2019/173636.

[0501] The modified cells of disclosure (e.g., CSR-T cells or CAR T-cells) can be further modified to silence or reduce expression of one or more gene(s) encoding a cell death or cell apoptosis receptor to produce an armored cell (e.g., armored CAR T-cell). Interaction of a death receptor and its endogenous ligand results in the initiation of apoptosis. Disruption of an expression, an activity, or an interaction of a cell death and/or cell apoptosis receptor and/or ligand render a modified cell less receptive to death signals, consequently, making the armored cell more efficacious in a tumor environment. Non-limiting examples of cell death and/or cell apoptosis receptors and ligands are disclosed in PCT Publication No. WO 2019/173636. A preferred example of cell death receptor which may be modified is Fas (CD95).

[0502] The modified cells of disclosure (e.g., CSR-T cells or CAR T-cells) can be further modified to silence or reduce expression of one or more gene(s) encoding a metabolic sensing protein to produce an armored cell (e.g., armored CAR T-cell). Disruption to the metabolic sensing of the immunosuppressive tumor microenvironment (characterized by low levels of oxygen, pH, glucose and other molecules) by a modified cell leads to extended retention of T-cell function and, consequently, more tumor cells killed per cell. Non-limiting examples of metabolic sensing genes and proteins are disclosed in PCT Publication No. WO 2019/173636. A preferred example, HIF1a and VHL play a role in T-cell function while in a hypoxic environment. An armored T-cell may have silenced or reduced expression of one or more genes encoding HIF1a or VHL.

[0503] The modified cells of disclosure (e.g., CSR-T cells or CAR T-cells) can be further modified to silence or reduce expression of one or more gene(s) encoding proteins that that confer sensitivity to a cancer therapy, including a monoclonal antibody, to produce an armored cell (e.g., armored CAR T-cell). Thus, an armored cell can function and may demonstrate superior function or efficacy whilst in the presence of a cancer therapy (e.g., a chemotherapy, a monoclonal antibody therapy, or another anti-tumor treatment). Non-limiting examples of proteins involved in conferring sensitivity to a cancer therapy are disclosed in PCT Publication No. WO 2019/173636.

[0504] The modified cells of disclosure (e.g., CSR-T cells or CAR T-cells) can be further modified to silence or reduce expression of one or more gene(s) encoding a growth advantage factor to produce an armored cell (e.g., armored CAR T-cell). Silencing or reducing expression of an oncogene can confer a growth advantage for the cell. For example, silencing or reducing expression (e.g., disrupting expression) of a TET2 gene during a CAR T-cell manufacturing process results in the generation of an armored CAR T-cell with a significant capacity for expansion and subsequent eradication of a tumor when compared to a non-armored CAR T-cell lacking this capacity for expansion. This strategy may be coupled to a safety switch (e.g., an iC9 safety switch described herein), which permits the targeted disruption of an armored CAR T-cell in the event of an adverse reaction from a subject or uncontrolled growth of the armored CAR T-cell. Non-limiting examples of growth advantage factors are disclosed in PCT Publication No. WO 2019/173636.

[0505] The modified cells of disclosure (e.g., CSR-T cells or CAR T-cells) can be further modified to express a modified/chimeric checkpoint receptor to produce an armored T-cell of the disclosure.

[0506] The modified/chimeric checkpoint receptor can comprise a null receptor, decoy receptor or dominant negative receptor. A null receptor, decoy receptor or dominant negative receptor can be modified/chimeric receptor/protein. A null receptor, decoy receptor or dominant negative receptor can be truncated for expression of the intracellular signaling domain. Alternatively, or in addition, a null receptor, decoy receptor or dominant negative receptor can be mutated within an intracellular signaling domain at one or more amino acid positions that are determinative or required for effective signaling. Truncation or mutation of null receptor, decoy receptor or dominant negative receptor can result in loss of the receptor's capacity to convey or transduce a checkpoint signal to the cell or within the cell.

[0507] For example, a dilution or a blockage of an immunosuppressive checkpoint signal from a PD-L1 receptor expressed on the surface of a tumor cell may be achieved by expressing a modified/chimeric PD-1 null receptor on the surface of an armored cell (e.g., armored CAR T-cell), which effectively competes with the endogenous (non-modified) PD-1 receptors also expressed on the surface of the armored cell to reduce or inhibit the transduction of the immunosuppressive checkpoint signal through endogenous PD-1 receptors of the armored cell. In this non-limiting example, competition between the two different receptors for binding to PD-L1 expressed on the tumor cell reduces or diminishes a level of effective checkpoint signaling, thereby enhancing a therapeutic potential of the armored cell expressing the PD-1 null receptor.

[0508] The modified/chimeric checkpoint receptor can comprise a null receptor, decoy receptor or dominant negative receptor that is a transmembrane receptor, a membrane-associated or membrane-linked receptor/protein or an intracellular receptor/protein. Exemplary null, decoy, or dominant negative intracellular receptors/proteins include, but are not limited to, signaling components downstream of an inhibitory checkpoint signal, a transcription factor, a cytokine or a cytokine receptor, a chemokine or a chemokine receptor, a cell death or apoptosis receptor/ligand, a metabolic sensing molecule, a protein conferring sensitivity to a cancer therapy, and an oncogene or a tumor suppressor gene. Non-limiting examples of cytokines, cytokine receptors, chemokines and chemokine receptors are disclosed in PCT Publication No. WO 2019/173636.

[0509] The modified/chimeric checkpoint receptor can comprise a switch receptor. Exemplary switch receptors comprise a modified/chimeric receptor/protein wherein a native or wild type intracellular signaling domain is switched or replaced with a different intracellular signaling domain that is either non-native to the protein and/or not a wild-type domain. For example, replacement of an inhibitory signaling domain with a stimulatory signaling domain would switch an immunosuppressive signal into an immunostimulatory signal. Alternatively, replacement of an inhibitory signaling domain with a different inhibitory domain can reduce or enhance the level of inhibitory signaling. Expression or overexpression, of a switch receptor can result in the dilution and/or blockage of a cognate checkpoint signal via competition with an endogenous wild-type checkpoint receptor (not a switch receptor) for binding to the cognate checkpoint receptor expressed within the immunosuppressive tumor microenvironment. Armored cells (e.g., armored CAR T-cells) can comprise a sequence encoding a switch receptor, leading to the expression of one or more switch receptors, and consequently, altering an activity of an armored cell. Armored cells (e.g., armored CAR T-cells) can express a switch receptor that targets an intracellularly expressed protein downstream of a checkpoint receptor, a transcription factor, a cytokine receptor, a death receptor, a metabolic sensing molecule, a cancer therapy, an oncogene, and/or a tumor suppressor protein or gene.

[0510] Exemplary switch receptors can comprise or can be derived from a protein including, but are not limited to, the signaling components downstream of an inhibitory checkpoint signal, a transcription factor, a cytokine or a cytokine receptor, a chemokine or a chemokine receptor, a cell death or apoptosis receptor/ligand, a metabolic sensing molecule, a protein conferring sensitivity to a cancer therapy, and an oncogene or a tumor suppressor gene.

[0511] The modified cells of disclosure (e.g., CSR-T cells or CAR T-cells) can be further modified to express a CLR/CAR that mediates conditional gene expression to produce an armored T-cell. The combination of the CLR/CAR and the condition gene expression system in the nucleus of the armored T-cell constitutes a synthetic gene expression system that is conditionally activated upon binding of cognate ligand(s) with CLR or cognate antigen(s) with CAR. This system may help to ‘armor’ or enhance therapeutic potential of modified T-cells by reducing or limiting synthetic gene expression at the site of ligand or antigen binding, at or within the tumor environment for example.

[0512] Gene Editing Compositions and Methods

[0513] A modified cell be produced by introducing a transgene into the cell. The introducing step may comprise delivery of a nucleic acid sequence, a transgene, and/or a genomic editing construct via a non-transposition delivery system.

[0514] Introducing a nucleic acid sequence, transgene and/or a genomic editing construct into a cell ex vivo, in vivo, in vitro or in situ can comprise one or more of topical delivery, adsorption, absorption, electroporation, spin-fection, co-culture, transfection, mechanical delivery, sonic delivery, vibrational delivery, magnetofection or by nanoparticle-mediated delivery. Introducing a nucleic acid sequence, a transgene and/or a genomic editing construct into a cell ex vivo, in vivo, in vitro or in situ can comprise liposomal transfection, calcium phosphate transfection, fugene transfection, and dendrimer-mediated transfection. Introducing a nucleic acid sequence, a transgene, and/or a genomic editing construct into a cell ex vivo, in vivo, in vitro or in situ by mechanical transfection can comprise cell squeezing, cell bombardment, or gene gun techniques. Introducing a nucleic acid sequence, transgene and/or a genomic editing construct into a cell ex vivo, in vivo, in vitro or in situ by nanoparticle-mediated transfection can comprise liposomal delivery, delivery by micelles, and delivery by polymerosomes.

[0515] Introducing a nucleic acid sequence, transgene and/or a genomic editing construct into a cell ex vivo, in vivo, in vitro or in situ can comprise a non-viral vector. The non-viral vector can comprise a nucleic acid. The non-viral vector can comprise plasmid DNA, linear double-stranded DNA (dsDNA), linear single-stranded DNA (ssDNA), DoggyBone™ DNA, nanoplasmids, minicircle DNA, single-stranded oligodeoxynucleotides (ssODN), DDNA oligonucleotides, single-stranded mRNA (ssRNA), and double-stranded mRNA (dsRNA). The non-viral vector can comprise a transposon as described herein.

[0516] Introducing a nucleic acid sequence, transgene and/or a genomic editing construct into a cell ex vivo, in vivo, in vitro or in situ can comprise a viral vector. The viral vector can be a non-integrating non-chromosomal vector. Non-limiting examples of non-integrating non-chromosomal vectors include adeno-associated virus (AAV), adenovirus, and herpes viruses. The viral vector can be an integrating chromosomal vector. Non-limiting examples of integrating chromosomal vectors include adeno-associated vectors (AAV), Lentiviruses, and gamma-retroviruses.

[0517] Introducing a nucleic acid sequence, transgene and/or a genomic editing construct into a cell ex vivo, in vivo, in vitro or in situ can comprise a combination of vectors. Non-limiting examples of vector combinations include viral and non-viral vectors, a plurality of non-viral vectors, or a plurality of viral vectors. Non-limiting examples of vector combinations include a combination of a DNA-derived and an RNA-derived vector, a combination of an RNA and a reverse transcriptase, a combination of a transposon and a transposase, a combination of a non-viral vector and an endonuclease, and a combination of a viral vector and an endonuclease.

[0518] Genome modification can comprise introducing a nucleic acid sequence, transgene and/or a genomic editing construct into a cell ex vivo, in vivo, in vitro or in situ to stably integrate a nucleic acid sequence, transiently integrate a nucleic acid sequence, produce site-specific integration of a nucleic acid sequence, or produce a biased integration of a nucleic acid sequence. The nucleic acid sequence can be a transgene.

[0519] Genome modification can comprise introducing a nucleic acid sequence, transgene and/or a genomic editing construct into a cell ex vivo, in vivo, in vitro or in situ to stably integrate a nucleic acid sequence. The stable chromosomal integration can be a random integration, a site-specific integration, or a biased integration. The site-specific integration can be non-assisted or assisted. The assisted site-specific integration is co-delivered with a site-directed nuclease. The site-directed nuclease comprises a transgene with 5′ and 3′ nucleotide sequence extensions that contain a percentage homology to upstream and downstream regions of the site of genomic integration. The transgene with homologous nucleotide extensions enable genomic integration by homologous recombination, microhomology-mediated end joining, or nonhomologous end-joining. The site-specific integration can occur at a safe harbor site. Genomic safe harbor sites are able to accommodate the integration of new genetic material in a manner that ensures that the newly inserted genetic elements function reliably (for example, are expressed at a therapeutically effective level of expression) and do not cause deleterious alterations to the host genome that cause a risk to the host organism. Non-limiting examples of potential genomic safe harbors include intronic sequences of the human albumin gene, the adeno-associated virus site 1 (AAVS1), a naturally occurring site of integration of AAV virus on chromosome 19, the site of the chemokine (C—C motif) receptor 5 (CCRS) gene and the site of the human ortholog of the mouse Rosa26 locus.

[0520] The site-specific transgene integration can occur at a site that disrupts expression of a target gene. Disruption of target gene expression can occur by site-specific integration at introns, exons, promoters, genetic elements, enhancers, suppressors, start codons, stop codons, and response elements. Non-limiting examples of target genes targeted by site-specific integration include TRAC, TRAB, PDI, any immunosuppressive gene, and genes involved in allo-rejection.

[0521] The site-specific transgene integration can occur at a site that results in enhanced expression of a target gene. Enhancement of target gene expression can occur by site-specific integration at introns, exons, promoters, genetic elements, enhancers, suppressors, start codons, stop codons, and response elements.

[0522] Enzymes can be used to create strand breaks in the host genome to facilitate delivery or integration of the transgene. Enzymes can create single-strand breaks or double-strand breaks. Non-limiting examples of break-inducing enzymes include transposases, integrases, endonucleases, CRISPR-Cas9, transcription activator-like effector nucleases (TALEN), zinc finger nucleases (ZFN), Cas-CLOVER™, and CPF1. Break-inducing enzymes can be delivered to the cell encoded in DNA, encoded in mRNA, as a protein, or as a nucleoprotein complex with a guide RNA (gRNA).

[0523] The site-specific transgene integration can be controlled by a vector-mediated integration site bias. Vector-mediated integration site bias can controlled by the chosen lentiviral vector or by the chosen gamma-retroviral vector.

[0524] The site-specific transgene integration site can be a non-stable chromosomal insertion. The integrated transgene can be become silenced, removed, excised, or further modified. The genome modification can be a non-stable integration of a transgene. The non-stable integration can be a transient non-chromosomal integration, a semi-stable non chromosomal integration, a semi-persistent non-chromosomal insertion, or a non-stable chromosomal insertion. The transient non-chromosomal insertion can be epi-chromosomal or cytoplasmic. In one aspect, the transient non-chromosomal insertion of a transgene does not integrate into a chromosome and the modified genetic material is not replicated during cell division.

[0525] The genome modification can be a semi-stable or persistent non-chromosomal integration of a transgene. A DNA vector encodes a Scaffold/matrix attachment region (S-MAR) module that binds to nuclear matrix proteins for episomal retention of a non-viral vector allowing for autonomous replication in the nucleus of dividing cells.

[0526] The genome modification can be a non-stable chromosomal integration of a transgene. The integrated transgene can become silenced, removed, excised, or further modified.

[0527] The modification to the genome by transgene insertion can occur via host cell-directed double-strand breakage repair (homology-directed repair) by homologous recombination (HR), microhomology-mediated end joining (MMEJ), nonhomologous end joining (NHEJ), transposase enzyme-mediated modification, integrase enzyme-mediated modification, endonuclease enzyme-mediated modification, or recombinant enzyme-mediated modification. The modification to the genome by transgene insertion can occur via CRISPR-Cas9, TALEN, ZFNs, Cas-CLOVER™, and cpfl.

[0528] In gene editing systems that involve inserting new or existing nucleotides/nucleic acids, insertion tools (e.g., DNA template vectors, transposable elements (transposons or retrotransposons) must be delivered to the cell in addition to the cutting enzyme (e.g., a nuclease, recombinase, integrase or transposase). Examples of such insertion tools for a recombinase may include a DNA vector. Other gene editing systems require the delivery of an integrase along with an insertion vector, a transposase along with a transposon/retrotransposon, etc. An example recombinase that may be used as a cutting enzyme is the CRE recombinase. Non-limiting examples of integrases that may be used in insertion tools include viral based enzymes taken from any of a number of viruses including AAV, gamma retrovirus, and lentivirus. Examples transposons/retrotransposons that may be used in insertion tools are described in more detail herein.

[0529] A cell with an ex vivo, in vivo, in vitro or in situ genomic modification can be a germline cell or a somatic cell. The modified cell can be a human, non-human, mammalian, rat, mouse, or dog cell. The modified cell can be differentiated, undifferentiated, or immortalized. The modified undifferentiated cell can be a stem cell. The modified undifferentiated cell can be an induced pluripotent stem cell. The modified cell can be an immune cell. The modified cell can be a T cell, a hematopoietic stem cell, a natural killer cell, a macrophage, a dendritic cell, a monocyte, a megakaryocyte, or an osteoclast. The modified cell can be modified while the cell is quiescent, in an activated state, resting, in interphase, in prophase, in metaphase, in anaphase, or in telophase. The modified cell can be fresh, cryopreserved, bulk, sorted into sub-populations, from whole blood, from leukapheresis, or from an immortalized cell line. A detailed description for isolating cells from a leukapheresis product or blood is disclosed in in PCT Publication No. WO 2019/173636 and PCT/US2019/049816.

[0530] The present disclosure provides a gene editing composition and/or a cell comprising the gene editing composition. The gene editing composition can comprise a sequence encoding a DNA binding domain and a sequence encoding a nuclease protein or a nuclease domain thereof. The sequence encoding a nuclease protein or the sequence encoding a nuclease domain thereof can comprise a DNA sequence, an RNA sequence, or a combination thereof. The nuclease or the nuclease domain thereof can comprise one or more of a CRISPR/Cas protein, a Transcription Activator-Like Effector Nuclease (TALEN), a Zinc Finger Nuclease (ZFN), and an endonuclease.

[0531] The nuclease or the nuclease domain thereof can comprise a nuclease-inactivated Cas (dCas) protein and an endonuclease. The endonuclease can comprise a Clo051 nuclease or a nuclease domain thereof. The gene editing composition can comprise a fusion protein. The fusion protein can comprise a nuclease-inactivated Cas9 (dCas9) protein and a Clo051 nuclease or a Clo051 nuclease domain. The gene editing composition can further comprise a guide sequence. The guide sequence comprises an RNA sequence.

[0532] The disclosure provides compositions comprising a small, Cas9 (Cas9) operatively-linked to an effector. The disclosure provides a fusion protein comprising, consisting essentially of or consisting of a DNA localization component and an effector molecule, wherein the effector comprises a small, Cas9 (Cas9). A small Cas9 construct of the disclosure can comprise an effector comprising a type IIS endonuclease. A Staphylococcus aureus Cas9 with an active catalytic site comprises the amino acid sequence of SEQ ID NO: 218.

[0533] The disclosure provides compositions comprising an inactivated, small, Cas9 (dSaCas9) operatively-linked to an effector. The disclosure provides a fusion protein comprising, consisting essentially of or consisting of a DNA localization component and an effector molecule, wherein the effector comprises a small, inactivated Cas9 (dSaCas9). A small, inactivated Cas9 (dSaCas9) construct of the disclosure can comprise an effector comprising a type IIS endonuclease. A dSaCas9 comprises the amino acid sequence of SEQ ID NO: 219, which includes a D1OA and a N580A mutation to inactivate the catalytic site.

[0534] The disclosure provides compositions comprising an inactivated Cas9 (dCas9) operatively-linked to an effector. The disclosure provides a fusion protein comprising, consisting essentially of or consisting of a DNA localization component and an effector molecule, wherein the effector comprises an inactivated Cas9 (dCas9). An inactivated Cas9 (dCas9) construct of the disclosure can comprise an effector comprising a type IIS endonuclease.

[0535] The dCas9 can be isolated or derived from Streptococcus pyogenes. The dCas9 can comprise a dCas9 with substitutions at amino acid positions 10 and 840, which inactivate the catalytic site. In some aspects, these substitutions are D10A and H840A. The dCas9 can comprise the amino acid sequence of SEQ ID NO: 220 or SEQ ID NO: 221.

[0536] An exemplary Clo051 nuclease domain comprises, consists essentially of or consists of, the amino acid sequence of SEQ ID NO: 222.

[0537] An exemplary dCas9-Clo051 (Cas-CLOVER) fusion protein can comprise, consist essentially of, or consist of, the amino acid sequence of SEQ ID NO: 223. The exemplary dCas9-Clo051 fusion protein can be encoded by a polynucleotide which comprises, consists essentially of, or consists of, the nucleic acid sequence of SEQ ID NO: 224. The nucleic acid encoding the dCas9-Clo051 fusion protein can be DNA or RNA.

[0538] An exemplary dCas9-Clo051 (Cas-CLOVER) fusion protein can comprise, consist essentially of, or consist of, the amino acid sequence of SEQ ID NO: 225. The exemplary dCas9-Clo051 fusion protein can be encoded by a polynucleotide which comprises, consists essentially of, or consists of, the nucleic acid sequence of SEQ ID NO: 226. The nucleic acid encoding the dCas9-Clo051 fusion protein can be DNA or RNA.

[0539] A cell comprising the gene editing composition can express the gene editing composition stably or transiently. Preferably, the gene editing composition is expressed transiently. The guide RNA can comprise a sequence complementary to a target sequence within a genomic DNA sequence. The target sequence within a genomic DNA sequence can be a target sequence within a safe harbor site of a genomic DNA sequence.

[0540] Gene editing compositions, including Cas-CLOVER, and methods of using these compositions for gene editing are described in detail in U.S. Patent Publication Nos. 2017/0107541, 2017/0114149, 2018/0187185 and U.S. Pat. No. 10,415,024.

[0541] Gene editing tools can also be delivered to cells using one or more poly(histidine)-based micelles. Poly(histidine) (e.g., poly(L-histidine)), is a pH-sensitive polymer due to the imidazole ring providing an electron lone pair on the unsaturated nitrogen. That is, poly(histidine) has amphoteric properties through protonation-deprotonation. In particular, at certain pHs, poly(histidine)—containing triblock copolymers may assemble into a micelle with positively charged poly(histidine) units on the surface, thereby enabling complexing with the negatively-charged gene editing molecule(s). Using these nanoparticles to bind and release proteins and/or nucleic acids in a pH-dependent manner may provide an efficient and selective mechanism to perform a desired gene modification. In particular, this micelle-based delivery system provides substantial flexibility with respect to the charged materials, as well as a large payload capacity, and targeted release of the nanoparticle payload. In one example, site-specific cleavage of the double stranded DNA is enabled by delivery of a nuclease using the poly(histidine)-based micelles. Without wishing to be bound by a particular theory, it is believed that believed that in the micelles that are formed by the various triblock copolymers, the hydrophobic blocks aggregate to form a core, leaving the hydrophilic blocks and poly(histidine) blocks on the ends to form one or more surrounding layer.

[0542] In an aspect, the disclosure provides triblock copolymers made of a hydrophilic block, a hydrophobic block, and a charged block. In some aspects, the hydrophilic block may be poly(ethylene oxide) (PEO), and the charged block may be poly(L-histidine). An example tri-block copolymer that can be used is a PEO-b-PLA-b-PHIS, with variable numbers of repeating units in each block varying by design.

[0543] Diblock copolymers that can be used as intermediates for making triblock copolymers can have hydrophilic biocompatible poly(ethylene oxide) (PEO), which is chemically synonymous with PEG, coupled to various hydrophobic aliphatic poly(anhydrides), poly(nucleic acids), poly(esters), poly(ortho esters), poly(peptides), poly(phosphazenes) and poly(saccharides), including but not limited by poly(lactide) (PLA), poly(glycolide) (PLGA), poly(lactic-co-glycolic acid) (PLGA), poly(ε-caprolactone) (PCL), and poly (trimethylene carbonate) (PTMC). Polymeric micelles comprised of 100% PEGylated surfaces possess improved in vitro chemical stability, augmented in vivo bioavailablity, and prolonged blood circulatory half-lives.

[0544] Polymeric vesicles, polymersomes and poly(Histidine)-based micelles, including those that comprise triblock copolymers, and methods of making the same, are described in further detail in U.S. Pat. Nos. 7,217,427; 7,868,512; 6,835,394; 8,808,748; 10,456,452; U.S. Publication Nos. 2014/0363496; 2017/0000743; and 2019/0255191; and PCT Publication No. WO 2019/126589.

[0545] Transposon and Vector Compositions

[0546] The present disclosure provides compositions and methods for delivering a CSR (e.g., comprising an scFv) to a cell or a population of cells. Non-limiting examples of compositions for delivery of a composition of the disclosure to a cell or a population of cells include a transposon or a vector. Thus, the present disclosure provides a transposon comprising a CSR (e.g., comprising an scFv) or a vector comprising an antibody a CSR (e.g., comprising an scFv).

[0547] A transposon comprising a CSR of the disclosure or a vector comprising a CSR of the disclosure can further comprise a sequence encoding an inducible proapoptotic polypeptide. Alternatively, or in addition, one transposon or one vector can comprise a CSR of the disclosure and a second transposon or second vector can comprise a sequence encoding an inducible proapoptotic polypeptide of the disclosure. Inducible proapoptotic polypeptides are described in more detail herein.

[0548] A transposon comprising a CSR of the disclosure or a vector comprising a CSR of the disclosure can further comprise a sequence encoding a chimeric antigen receptor (CAR). Alternatively, or in addition, one transposon or one vector can comprise a CAR of the disclosure and a second transposon or a second vector can comprise a sequence encoding a CSR of the disclosure. Chimeric stimulatory receptors are described in more detail herein.

[0549] A transposon comprising a CSR of the disclosure or a vector comprising a CSR of the disclosure can further comprise a sequence encoding a recombinant HLA-E polypeptide. Alternatively, or in addition, one transposon or one vector can comprise a CSR of the disclosure and a second transposon or a second vector can comprise a sequence encoding a recombinant HLA-E polypeptide. Recombinant HLA-E polypeptide are described in more detail herein.

[0550] A transposon comprising a CSR of the disclosure or a vector comprising a CSR of the disclosure can further comprise a selection gene. The selection gene can encode a gene product essential for cell viability and survival. The selection gene can encode a gene product essential for cell viability and survival when challenged by selective cell culture conditions. Selective cell culture conditions may comprise a compound harmful to cell viability or survival and wherein the gene product confers resistance to the compound. Non-limiting examples of selection genes include neo (conferring resistance to neomycin), DHFR (encoding Dihydrofolate Reductase and conferring resistance to Methotrexate), TYMS (encoding Thymidylate Synthetase), MGMT (encoding O(6)-methylguanine-DNA methyltransferase), multidrug resistance gene (MDR1), ALDH1 (encoding Aldehyde dehydrogenase 1 family, member A1), FRANCF, RAD51C (encoding RAD51 Paralog C), GCS (encoding glucosylceramide synthase), NKX2.2 (encoding NK2 Homeobox 2), or any combination thereof.

[0551] In a preferred aspect, the selection gene encodes a DHFR mutein enzyme. The DHFR mutein enzyme comprises, consists essentially of, or consists of the amino acid sequence of SEQ ID NO: 227. The DHFR mutein enzyme is encoded by a polynucleotide comprising, consisting essential of, or consisting of the nucleic acid sequence of SEQ ID NO: 228 or SEQ ID NO: 229. The amino acid sequence of the DHFR mutein enzyme can further comprise a mutation at one or more of positions 80, 113, or 153. The amino acid sequence of the DHFR mutein enzyme can comprise one or more of a substitution of a Phenylalanine (F) or a Leucine (L) at position 80, a substitution of a Leucine (L) or a Valine (V) at position 113, and a substitution of a Valine (V) or an Aspartic Acid (D) at position 153.

[0552] A transposon comprising a CSR of the disclosure or a vector comprising a CSR of the disclosure can further comprise at least one self-cleaving peptide. For example, a self-cleaving peptide can be located between a CSR (e.g., comprising an scFv) and an inducible proapoptotic polypeptide; or, a self-cleaving peptide can be located between a CSR (e.g., comprising an scFv) and protein encoded by a selection gene.

[0553] A transposon comprising a CSR of the disclosure or a vector comprising a CSR of the disclosure can further comprise at least two self-cleaving peptides. For example, a first self-cleaving peptide is located upstream or immediately upstream of a CSR and a second self-cleaving peptide is located downstream or immediately downstream of a CSR; or, the first self-cleaving peptide and the second self-cleaving peptide flank a CSR. For example, a first self-cleaving peptide is located upstream or immediately upstream of an inducible proapoptotic polypeptide and a second self-cleaving peptide is located downstream or immediately downstream of an inducible proapoptotic polypeptide; or, the first self-cleaving peptide and the second self-cleaving peptide flank an inducible proapoptotic polypeptide. For example, a first self-cleaving peptide is located upstream or immediately upstream of protein encoded by a selection gene and a second self-cleaving peptide is located downstream or immediately downstream of a protein encoded by a selection gene; or, the first self-cleaving peptide and the second self-cleaving peptide flank a protein encoded by a selection gene.

[0554] Non-limiting examples of self-cleaving peptides include a T2A peptide, GSG-T2A peptide, an E2A peptide, a GSG-E2A peptide, an F2A peptide, a GSG-F2A peptide, a P2A peptide, or a GSG-P2A peptide. A T2A peptide comprises, consists essential of, or consists of, the amino acid sequence at least 75%, 80%, 85%, 90%, 95%, 96%, 97%, 98%, 99% or 100% (or any percentage in between) identical to SEQ ID NO: 230. A GSG-T2A peptide comprises, consists essential of, or consists of, the amino acid sequence at least 75%, 80%, 85%, 90%, 95%, 96%, 97%, 98%, 99% or 100% (or any percentage in between) identical to SEQ ID NO: 231. A GSG-T2A polypeptide is encoded by a polynucleotide comprising or consisting of an nucleic acid sequence at least 75%, 80%, 85%, 90%, 95%, 96%, 97%, 98%, 99% or 100% (or any percentage in between) identical to SEQ ID NO: 232. A E2A peptide comprises, consists essential of, or consists of, the amino acid sequence at least 75%, 80%, 85%, 90%, 95%, 96%, 97%, 98%, 99% or 100% (or any percentage in between) identical to SEQ ID NO: 233. A GSG-E2A peptide comprises, consists essential of, or consists of, the amino acid sequence at least 75%, 80%, 85%, 90%, 95%, 96%, 97%, 98%, 99% or 100% (or any percentage in between) identical to SEQ ID NO: 234. A F2A peptide comprises, consists essential of, or consists of, the amino acid sequence at least 75%, 80%, 85%, 90%, 95%, 96%, 97%, 98%, 99% or 100% (or any percentage in between) identical to SEQ ID NO: 235. A GSG-F2A peptide comprises, consists essential of, or consists of, the amino acid sequence at least 75%, 80%, 85%, 90%, 95%, 96%, 97%, 98%, 99% or 100% (or any percentage in between) identical to SEQ ID NO: 236. A P2A peptide comprises, consists essential of, or consists of, the amino acid sequence at least 75%, 80%, 85%, 90%, 95%, 96%, 97%, 98%, 99% or 100% (or any percentage in between) identical to SEQ ID NO: 237. A GSG-P2A peptide comprises, consists essential of, or consists of, the amino acid sequence at least 75%, 80%, 85%, 90%, 95%, 96%, 97%, 98%, 99% or 100% (or any percentage in between) identical to SEQ ID NO: 238.

[0555] Transposition Systems

[0556] The present disclosure provides a transposon comprising a protein scaffold as disclosed herein or the present disclosure provides a transposon comprising a CSR or a CAR (e.g., comprising an scFv) as disclosed herein. In a preferred aspect, the transposon is a plasmid DNA transposon comprising a nucleotide sequence encoding a CSR or CAR (e.g., comprising an scFv) as disclosed herein flanked by two cis-regulatory insulator elements. The present disclosure also provides a composition comprising a transposon. In a preferred aspect, the composition comprising the transposon further comprises a plasmid comprising a nucleotide sequence encoding a transposase. The nucleotide sequence encoding the transposase may be a DNA sequence or an RNA sequence. Preferably, the sequence encoding the transposase is an mRNA sequence.

[0557] A transposon of the present disclosure can be a piggyBac™ (PB) transposon. In some aspects when the transposon is a PB transposon, the transposase is a piggyBac™ (PB) transposase a piggyBac-like (PBL) transposase or a Super piggyBac™ (SPB) transposase. The sequence encoding the SPB transposase is an mRNA sequence.

[0558] Non-limiting examples of PB transposons and PB, PBL and SPB transposases are described in detail in U.S. Pat. Nos. 6,218,182; 6,962,810; 8,399,643 and PCT Publication No. WO 2010/099296.

[0559] The PB, PBL and SPB transposases recognize transposon-specific inverted terminal repeat sequences (ITRs) on the ends of the transposon, and inserts the contents between the ITRs at the sequence 5′-TTAT-3′ within a chromosomal site (a TTAT target sequence) or at the sequence 5′-TTAA-3′ within a chromosomal site (a TTAA target sequence). The target sequence of the PB or PBL transposon can comprise or consist of 5′-CTAA-3′, 5′-TTAG-3′, 5′-ATAA-3′, 5′-TCAA-3′, 5′AGTT-3′, 5′-ATTA-3′, 5′-GTTA-3′, 5′-TTGA-3′, 5′-TTTA-3′, 5′-TTAC-3′, 5′-ACTA-3′, 5′-AGGG-3′, 5′-CTAG-3′, 5′-TGAA-3′, 5′-AGGT-3′, 5′-ATCA-3′, 5′-CTCC-3′, 5′-TAAA-3′, 5′-TCTC-3′, 5′ TGAA-3′, 5′-AAAT-3′, 5′-AATC-3′, 5′-ACAA-3′, 5′-ACAT-3′, 5′-ACTC-3′, 5′-AGTG-3′, 5′-ATAG-3′, 5′-CAAA-3′, 5′-CACA-3′, 5′-CATA-3′, 5′-CCAG-3′, 5′-CCCA-3′, 5′-CGTA-3′, 5′-GTCC-3′, 5′-TAAG-3′, 5′-TCTA-3′, 5′-TGAG-3′, 5′-TGTT-3′, 5′-TTCA-3′5′-TTCT-3′ and 5′-TTTT-3′. The PB or PBL transposon system has no payload limit for the genes of interest that can be included between the ITRs.

[0560] Exemplary amino acid sequence for one or more PB, PBL and SPB transposases are disclosed in U.S. Pat. Nos. 6,218,185; 6,962,810 and 8,399,643. In a preferred aspect, the PB transposase comprises or consists of an amino acid sequence at least 75%, 80%, 85%, 90%, 95%, 96%, 97%, 98%, 99% or 100% (or any percentage in between) identical to SEQ ID NO: 239.

[0561] The PB or PBL transposase can comprise or consist of an amino acid sequence having an amino acid substitution at two or more, at three or more or at each of positions 30, 165, 282, or 538 of the sequence of SEQ ID NO: 239. The transposase can be a SPB transposase that comprises or consists of the amino acid sequence of the sequence of SEQ ID NO: 239 wherein the amino acid substitution at position 30 can be a substitution of a valine (V) for an isoleucine (I), the amino acid substitution at position 165 can be a substitution of a serine (S) for a glycine (G), the amino acid substitution at position 282 can be a substitution of a valine (V) for a methionine (M), and the amino acid substitution at position 538 can be a substitution of a lysine (K) for an asparagine (N). In a preferred aspect, the SPB transposase comprises or consists of an amino acid sequence at least 75%, 80%, 85%, 90%, 95%, 96%, 97%, 98%, 99% or 100% (or any percentage in between) identical to SEQ ID NO: 240.

[0562] In certain aspects wherein the transposase comprises the above-described mutations at positions 30, 165, 282 and/or 538, the PB, PBL and SPB transposases can further comprise an amino acid substitution at one or more of positions 3, 46, 82, 103, 119, 125, 177, 180, 185, 187, 200, 207, 209, 226, 235, 240, 241, 243, 258, 296, 298, 311, 315, 319, 327, 328, 340, 421, 436, 456, 470, 486, 503, 552, 570 and 591 of the sequence of SEQ ID NO: 239 or SEQ ID NO: 240 are described in more detail in PCT Publication No. WO 2019/173636 and PCT/US2019/049816.

[0563] The PB, PBL or SPB transposases can be isolated or derived from an insect, vertebrate, crustacean or urochordate as described in more detail in PCT Publication No. WO 2019/173636 and PCT/US2019/049816. In preferred aspects, the PB, PBL or SPB transposases is be isolated or derived from the insect Trichoplusia ni (GenBank Accession No. AAA87375) or Bombyx mori (GenBank Accession No. BAD11135).

[0564] A hyperactive PB or PBL transposase is a transposase that is more active than the naturally occurring variant from which it is derived. In a preferred aspect, a hyperactive PB or PBL transposase is isolated or derived from Bombyx mori or Xenopus tropicalis. Examples of hyperactive PB or PBL transposases are disclosed in U.S. Pat. Nos. 6,218,185; 6,962,810, 8,399,643 and WO 2019/173636. A list of hyperactive amino acid substitutions is disclosed in U.S. Pat. No. 10,041,077.

[0565] In some aspects, the PB or PBL transposase is integration deficient. An integration deficient PB or PBL transposase is a transposase that can excise its corresponding transposon, but that integrates the excised transposon at a lower frequency than a corresponding wild type transposase. Examples of integration deficient PB or PBL transposases are disclosed in U.S. Pat. Nos. 6,218,185; 6,962,810, 8,399,643 and WO 2019/173636. A list of integration deficient amino acid substitutions is disclosed in U.S. Pat. No. 10,041,077.

[0566] In some aspects, the PB or PBL transposase is fused to a nuclear localization signal. Examples of PB or PBL transposases fused to a nuclear localization signal are disclosed in U.S. Pat. Nos. 6,218,185; 6,962,810, 8,399,643 and WO 2019/173636.

[0567] A transposon of the present disclosure can be a Sleeping Beauty transposon. In some aspects, when the transposon is a Sleeping Beauty transposon, the transposase is a Sleeping Beauty transposase (for example as disclosed in U.S. Pat. No. 9,228,180) or a hyperactive Sleeping Beauty (SB100X) transposase. In a preferred aspect, the Sleeping Beauty transposase comprises or consists of an amino acid sequence at least 75%, 80%, 85%, 90%, 95%, 96%, 97%, 98%, 99% or 100% (or any percentage in between) identical to SEQ ID NO: 241. In a preferred aspect, hyperactive Sleeping Beauty (SB100X) transposase comprises or consists of an amino acid sequence at least 75%, 80%, 85%, 90%, 95%, 96%, 97%, 98%, 99% or 100% (or any percentage in between) identical to SEQ ID NO: 242.

[0568] A transposon of the present disclosure can be a Helraiser transposon. An exemplary Helraiser transposon includes Helibat1, which comprises or consists of a nucleic acid sequence at least 75%, 80%, 85%, 90%, 95%, 96%, 97%, 98%, 99% or 100% (or any percentage in between) identical to SEQ ID NO: 243. In some aspects, when the transposon is a Helraiser transposon, the transposase is a Helitron transposase (for example, as disclosed in WO 2019/173636). In a preferred aspect, Helitron transposase comprises or consists of an amino acid sequence at least 75%, 80%, 85%, 90%, 95%, 96%, 97%, 98%, 99% or 100% (or any percentage in between) identical to SEQ ID NO: 244.

[0569] A transposon of the present disclosure can be a To12 transposon. An exemplary To12 transposon, including inverted repeats, subterminal sequences and the To12 transposase, comprises or consists of a nucleic acid sequence at least 75%, 80%, 85%, 90%, 95%, 96%, 97%, 98%, 99% or 100% (or any percentage in between) identical to SEQ ID NO: 245. In some aspects, when the transposon is a To12 transposon, the transposase is a To12 transposase (for example, as disclosed in WO 2019/173636). In a preferred aspect, To12 transposase comprises or consists of an amino acid sequence at least 75%, 80%, 85%, 90%, 95%, 96%, 97%, 98%, 99% or 100% (or any percentage in between) identical to SEQ ID NO: 246.

[0570] A transposon of the present disclosure can be a TcBuster transposon. In some aspects, when the transposon is a TcBuster transposon, the transposase is a TcBuster transposase or a hyperactive TcBuster transposase (for example, as disclosed in WO 2019/173636). The TcBuster transposase can comprise or consist of a naturally occurring amino acid sequence or a non-naturally occurring amino acid sequence. In a preferred aspect, a TcBuster transposase comprises or consists of an amino acid sequence at least 75%, 80%, 85%, 90%, 95%, 96%, 97%, 98%, 99% or 100% (or any percentage in between) identical to SEQ ID NO: 247. The polynucleotide encoding a TcBuster transposase can comprise or consist of a naturally occurring nucleic acid sequence or a non-naturally occurring nucleic acid sequence. In a preferred aspect, a TcBuster transposase is encoded by a polynucleotide comprising or consisting of an nucleic acid sequence at least 75%, 80%, 85%, 90%, 95%, 96%, 97%, 98%, 99% or 100% (or any percentage in between) identical to SEQ ID NO: 248.

[0571] In some aspects, a mutant TcBuster transposase comprises one or more sequence variations when compared to a wild type TcBuster transposase as described in more detail in PCT Publication No. WO 2019/173636 and PCT/US2019/049816.

[0572] The transposon can be a nanotransposon. A nanotransposon can comprise, consist essential of, or consist of (a) a sequence encoding a transposon insert, comprising a sequence encoding a first inverted terminal repeat (ITR), a sequence encoding a second inverted terminal repeat (ITR), and an intra-ITR sequence; (b) a sequence encoding a backbone, wherein the sequence encoding the backbone comprises a sequence encoding an origin of replication having between 1 and 450 nucleotides, inclusive of the endpoints, and a sequence encoding a selectable marker having between 1 and 200 nucleotides, inclusive of the endpoints, and (c) an inter-ITR sequence. In some aspects, the inter-ITR sequence of (c) comprises the sequence of (b). In some aspects, the intra-ITR sequence of (a) comprises the sequence of (b).

[0573] The sequence encoding the backbone can comprise between 1 and 600 nucleotides, inclusive of the endpoints. In some aspects, the sequence encoding the backbone consists of between 1 and 50 nucleotides, between 50 and 100 nucleotides, between 100 and 150 nucleotides, between 150 and 200 nucleotides, between 200 and 250 nucleotides, between 250 and 300 nucleotides, between 300 and 350 nucleotides, between 350 and 400 nucleotides, between 400 and 450 nucleotides, between 450 and 500 nucleotides, between 500 and 550 nucleotides, between 550 and 600 nucleotides, each range inclusive of the endpoints.

[0574] The inter-ITR sequence can comprise between 1 and 1000 nucleotides, inclusive of the endpoints. In some aspects, the inter-ITR sequence consists of between 1 and 50 nucleotides, between 50 and 100 nucleotides, between 100 and 150 nucleotides, between 150 and 200 nucleotides, between 200 and 250 nucleotides, between 250 and 300 nucleotides, between 300 and 350 nucleotides, between 350 and 400 nucleotides, between 400 and 450 nucleotides, between 450 and 500 nucleotides, between 500 and 550 nucleotides, between 550 and 600 nucleotides, between 600 and 650 nucleotides, between 650 and 700 nucleotides, between 700 and 750 nucleotides, between 750 and 800 nucleotides, between 800 and 850 nucleotides, between 850 and 900 nucleotides, between 900 and 950 nucleotides, or between 950 and 1000 nucleotides, each range inclusive of the endpoints.

[0575] The nanotransposon can be a short nanotransposon (SNT) wherein the inter-ITR sequence comprises between 1 and 200 nucleotides, inclusive of the endpoints. The inter-ITR sequence can consist of between 1 and 10 nucleotides, between 10 and 20 nucleotides, between 20 and 30 nucleotides, between 30 and 40 nucleotides, between 40 and 50 nucleotides, between 50 and 60 nucleotides, between 60 and 70 nucleotides, between 70 and 80 nucleotides, between 80 and 90 nucleotides, or between 90 and 100 nucleotides, each range inclusive of the endpoints.

[0576] The selectable marker having between 1 and 200 nucleotides, inclusive of the endpoints, can comprise a sequence encoding a sucrose-selectable marker. The sequence encoding a sucrose-selectable marker can comprise a sequence encoding an RNA-OUT sequence. The sequence encoding an RNA-OUT sequence can comprise or consist of 137 base pairs (bp). The selectable marker having between 1 and 200 nucleotides, inclusive of the endpoints, can comprise a sequence encoding a fluorescent marker. The selectable marker having between 1 and 200 nucleotides, inclusive of the endpoints, can comprise a sequence encoding a cell surface marker.

[0577] The sequence encoding an origin of replication having between 1 and 450 nucleotides, inclusive of the endpoints, can comprise a sequence encoding a mini origin of replication. In some aspects, the sequence encoding an origin of replication having between 1 and 450 nucleotides, inclusive of the endpoints, comprises a sequence encoding an R6K origin of replication. The R6K origin of replication can comprise an R6K gamma origin of replication. The R6K origin of replication can comprise an R6K mini origin of replication. The R6K origin of replication can comprise an R6K gamma mini origin of replication. The R6K gamma mini origin of replication can comprise or consist of 281 base pairs (bp).

[0578] In some aspects of the nanotransposon, the sequence encoding the backbone does not comprise a recombination site, an excision site, a ligation site or a combination thereof. In some aspects, neither the nanotransposon nor the sequence encoding the backbone comprises a product of a recombination site, an excision site, a ligation site or a combination thereof. In some aspects, neither the nanotransposon nor the sequence encoding the backbone is derived from a recombination site, an excision site, a ligation site or a combination thereof.

[0579] In some aspects of the nanotransposon, a recombination site comprises a sequence resulting from a recombination event. In some aspects, a recombination site comprises a sequence that is a product of a recombination event. In some aspects, the recombination event comprises an activity of a recombinase (e.g., a recombinase site).

[0580] In some aspects of the nanotransposon, the sequence encoding the backbone does not further comprise a sequence encoding foreign DNA.

[0581] In some aspects of the nanotransposon, the inter-ITR sequence does not comprise a recombination site, an excision site, a ligation site or a combination thereof. In some aspects, the inter-ITR sequence does not comprise a product of a recombination event, an excision event, a ligation event or a combination thereof. In some aspects, the inter-ITR sequence is not derived from a recombination event, an excision event, a ligation event or a combination thereof. In some aspects, the inter-ITR sequence comprises a sequence encoding foreign DNA. In some aspects, the intra-ITR sequence comprises at least one sequence encoding an insulator and a sequence encoding a promoter capable of expressing an exogenous sequence in a mammalian cell. The mammalian cell can be a human cell. In some aspects, the intra-ITR sequence comprises a first sequence encoding an insulator, a sequence encoding a promoter capable of expressing an exogenous sequence in a mammalian cell and a second sequence encoding an insulator. In some aspects, the intra-ITR sequence comprises a first sequence encoding an insulator, a sequence encoding a promoter capable of expressing an exogenous sequence in a mammalian cell, a polyadenosine (polyA) sequence and a second sequence encoding an insulator. In some aspects, the intra-ITR sequence comprises a first sequence encoding an insulator, a sequence encoding a promoter capable of expressing an exogenous sequence in a mammalian cell, at least one exogenous sequence, a polyadenosine (polyA) sequence and a second sequence encoding an insulator.

[0582] Nanotransposons are described in more detail in PCT/US2019/067758.

[0583] Vector Systems

[0584] A vector of the present disclose can be a viral vector or a recombinant vector. Viral vectors can comprise a sequence isolated or derived from a retrovirus, a lentivirus, an adenovirus, an adeno-associated virus or any combination thereof. The viral vector may comprise a sequence isolated or derived from an adeno-associated virus (AAV). The viral vector may comprise a recombinant AAV (rAAV). Exemplary adeno-associated viruses and recombinant adeno-associated viruses comprise two or more inverted terminal repeat (ITR) sequences located in cis next to a sequence encoding a CSR or a CAR of the disclosure. Exemplary adeno-associated viruses and recombinant adeno-associated viruses include, but are not limited to all serotypes (e.g., AAV1, AAV2, AAV3, AAV4, AAV5, AAV6, AAV7, AAV8, and AAV9). Exemplary adeno-associated viruses and recombinant adeno-associated viruses include, but are not limited to, self-complementary AAV (scAAV) and AAV hybrids containing the genome of one serotype and the capsid of another serotype (e.g., AAV2/5, AAV-DJ and AAV-DJ8). Exemplary adeno-associated viruses and recombinant adeno-associated viruses include, but are not limited to, rAAV-LK03.

[0585] A vector of the present disclose can be a nanoparticle. Non-limiting examples of nanoparticle vectors include nucleic acids (e.g., RNA, DNA, synthetic nucleotides, modified nucleotides or any combination thereof), amino acids (L-amino acids, D-amino acids, synthetic amino acids, modified amino acids, or any combination thereof), polymers (e.g., polymersomes), micelles, lipids (e.g., liposomes), organic molecules (e.g., carbon atoms, sheets, fibers, tubes), inorganic molecules (e.g., calcium phosphate or gold) or any combination thereof. A nanoparticle vector can be passively or actively transported across a cell membrane.

[0586] The cell delivery compositions (e.g., transposons, vectors) disclosed herein can comprise a nucleic acid encoding a therapeutic protein or therapeutic agent. Examples of therapeutic proteins include those disclosed in PCT Publication No. WO 2019/173636 and PCT/US2019/049816.

[0587] Inducible Proapoptotic Polypeptides

[0588] The inducible proapoptotic polypeptides disclosed herein are superior to existing inducible polypeptides because the inducible proapoptotic polypeptides of the disclosure are far less immunogenic. The inducible proapoptotic polypeptides are recombinant polypeptides, and, therefore, non-naturally occurring. Further, the sequences that are recombined to produce inducible proapoptotic polypeptides that do not comprise non-human sequences that the host human immune system could recognize as “non-self” and, consequently, induce an immune response in the subject receiving the inducible proapoptotic polypeptide, a cell comprising the inducible proapoptotic polypeptide or a composition comprising the inducible proapoptotic polypeptide or the cell comprising the inducible proapoptotic polypeptide.

[0589] The disclosure provides inducible proapoptotic polypeptides comprising a ligand binding region, a linker, and a proapoptotic peptide, wherein the inducible proapoptotic polypeptide does not comprise a non-human sequence. In certain aspects, the non-human sequence comprises a restriction site. In certain aspects, the ligand binding region can be a multimeric ligand binding region. In certain aspects, the proapoptotic peptide is a caspase polypeptide. Non-limiting examples of caspase polypeptides include caspase 1, caspase 2, caspase 3, caspase 4, caspase 5, caspase 6, caspase 7, caspase 8, caspase 9, caspase 10, caspase 11, caspase 12, and caspase 14. Preferably, the caspase polypeptide is a caspase 9 polypeptide. The caspase 9 polypeptide can be a truncated caspase 9 polypeptide. Inducible proapoptotic polypeptides can be non-naturally occurring. When the caspase is caspase 9 or a truncated caspase 9, the inducible proapoptotic polypeptides can also be referred to as an “iC9 safety switch”.

[0590] An inducible caspase polypeptide can comprise (a) a ligand binding region, (b) a linker, and (c) a caspase polypeptide, wherein the inducible proapoptotic polypeptide does not comprise a non-human sequence. In certain aspects, an inducible caspase polypeptide comprises (a) a ligand binding region, (b) a linker, and (c) a truncated caspase 9 polypeptide, wherein the inducible proapoptotic polypeptide does not comprise a non-human sequence.

[0591] The ligand binding region can comprise a FK506 binding protein 12 (FKBP12) polypeptide. The amino acid sequence of the ligand binding region that comprises a FK506 binding protein 12 (FKBP12) polypeptide can comprise a modification at position 36 of the sequence. The modification can be a substitution of valine (V) for phenylalanine (F) at position 36 (F36V). The FKBP12 polypeptide can comprise, consist essential of, or consist of, the amino acid sequence at least 75%, 80%, 85%, 90%, 95%, 96%, 97%, 98%, 99% or 100% (or any percentage in between) identical to SEQ ID NO: 249. The FKBP12 polypeptide can be encoded by a polynucleotide comprising or consisting of an nucleic acid sequence at least 75%, 80%, 85%, 90%, 95%, 96%, 97%, 98%, 99% or 100% (or any percentage in between) identical to SEQ ID NO: 250.

[0592] The linker region can comprise, consist essential of, or consist of, the amino acid sequence at least 75%, 80%, 85%, 90%, 95%, 96%, 97%, 98%, 99% or 100% (or any percentage in between) identical to SEQ ID NO: 251 or the linker region can be encoded by a polynucleotide comprising or consisting of an nucleic acid sequence at least 75%, 80%, 85%, 90%, 95%, 96%, 97%, 98%, 99% or 100% (or any percentage in between) identical to SEQ ID NO: 252. In some aspects, the nucleic acid sequence encoding the linker does not comprise a restriction site.

[0593] The truncated caspase 9 polypeptide can comprise an amino acid sequence that does not comprise an arginine (R) at position 87 of the sequence. Alternatively, or in addition, the truncated caspase 9 polypeptide can comprise an amino acid sequence that does not comprise an alanine (A) at position 282 the sequence. The truncated caspase 9 polypeptide can comprise, consist essential of, or consist of, the amino acid sequence at least 75%, 80%, 85%, 90%, 95%, 96%, 97%, 98%, 99% or 100% (or any percentage in between) identical to SEQ ID NO: 253 or the truncated caspase 9 polypeptide can be encoded by a polynucleotide comprising or consisting of an nucleic acid sequence at least 75%, 80%, 85%, 90%, 95%, 96%, 97%, 98%, 99% or 100% (or any percentage in between) identical to SEQ ID NO: 254.

[0594] In certain aspects when the polypeptide comprises a truncated caspase 9 polypeptide, the inducible proapoptotic polypeptide comprises, consists essential of, or consists of, the amino acid sequence at least 75%, 80%, 85%, 90%, 95%, 96%, 97%, 98%, 99% or 100% (or any percentage in between) identical to SEQ ID NO: 255 or the inducible proapoptotic polypeptide is encoded by a polynucleotide comprising or consisting of an nucleic acid sequence at least 75%, 80%, 85%, 90%, 95%, 96%, 97%, 98%, 99% or 100% (or any percentage in between) identical to SEQ ID NO: 256.

[0595] In certain aspects when the polypeptide comprises a truncated caspase 9 polypeptide, the inducible proapoptotic polypeptide comprises, consists essential of, or consists of, the amino acid sequence at least 75%, 80%, 85%, 90%, 95%, 96%, 97%, 98%, 99% or 100% (or any percentage in between) identical to SEQ ID NO: 257 or the inducible proapoptotic polypeptide is encoded by a polynucleotide comprising or consisting of an nucleic acid sequence at least 75%, 80%, 85%, 90%, 95%, 96%, 97%, 98%, 99% or 100% (or any percentage in between) identical to SEQ ID NO: 258.

[0596] Inducible proapoptotic polypeptides can be expressed in a cell under the transcriptional regulation of any promoter known in the art that is capable of initiating and/or regulating the expression of an inducible proapoptotic polypeptide in that cell.

[0597] Activation of inducible proapoptotic polypeptides can be accomplished through, for example, chemically induced dimerization (CID) mediated by an induction agent to produce a conditionally controlled protein or polypeptide. Proapoptotic polypeptides not only inducible, but the induction of these polypeptides is also reversible, due to the degradation of the labile dimerizing agent or administration of a monomeric competitive inhibitor.

[0598] In certain aspects when the ligand binding region comprises a FKBP12 polypeptide having a substitution of valine (V) for phenylalanine (F) at position 36 (F36V), the induction agent can comprise AP1903, a synthetic drug (CAS Index Name: 2-Piperidinecarboxylic acid, 1-[(2S)-1-oxo-2-(3,4,5-trimethoxyphenyl)butyl]—, 1,2-ethanediylbis[imino(2-oxo-2,1-ethanediyl)oxy-3,1-phenylene[(1R)-3-(3,4-dimethoxyphenyl)propylidene]]ester, [2S-[1(R*),2R*[S*[S*[1(R*),2R*]]]]]—(9C1) CAS Registry Number: 195514-63-7; Molecular Formula: C78H98N4020; Molecular Weight: 1411.65)); AP20187 (CAS Registry Number: 195514-80-8 and Molecular Formula: C82H107N5020) or an AP20187 analog, such as, for example, AP1510. As used herein, the induction agents AP20187, AP1903 and AP1510 can be used interchangeably.

[0599] Inducible proapoptotic peptides and methods of inducing these peptides are described in detail in U.S. Patent Publication No. WO 2019/0225667 and PCT Publication No. WO 2018/068022.

[0600] Formulations, Dosages and Modes of Administration

[0601] The present disclosure provides formulations, dosages and methods for administration of the compositions described herein.

[0602] The disclosed compositions and pharmaceutical compositions can further comprise at least one of any suitable auxiliary, such as, but not limited to, diluent, binder, stabilizer, buffers, salts, lipophilic solvents, preservative, adjuvant or the like. Pharmaceutically acceptable auxiliaries are preferred. Non-limiting examples of, and methods of preparing such sterile solutions are well known in the art, such as, but limited to, Gennaro, Ed., Remington's Pharmaceutical Sciences, 18th Edition, Mack Publishing Co. (Easton, Pa.) 1990 and in the “Physician's Desk Reference”, 52nd ed., Medical Economics (Montvale, N.J.) 1998. Pharmaceutically acceptable carriers can be routinely selected that are suitable for the mode of administration, solubility and/or stability of the protein scaffold, fragment or variant composition as well known in the art or as described herein.

[0603] Non-limiting examples of pharmaceutical excipients and additives suitable for use include proteins, peptides, amino acids, lipids, and carbohydrates (e.g., sugars, including monosaccharides, di—, tri—, tetra—, and oligosaccharides; derivatized sugars, such as alditols, aldonic acids, esterified sugars and the like; and polysaccharides or sugar polymers), which can be present singly or in combination, comprising alone or in combination 1-99.99% by weight or volume. Non-limiting examples of protein excipients include serum albumin, such as human serum albumin (HSA), recombinant human albumin (rHA), gelatin, casein, and the like. Representative amino acid/protein components, which can also function in a buffering capacity, include alanine, glycine, arginine, betaine, histidine, glutamic acid, aspartic acid, cysteine, lysine, leucine, isoleucine, valine, methionine, phenylalanine, aspartame, and the like. One preferred amino acid is glycine.

[0604] Non-limiting examples of carbohydrate excipients suitable for use include monosaccharides, such as fructose, maltose, galactose, glucose, D-mannose, sorbose, and the like; disaccharides, such as lactose, sucrose, trehalose, cellobiose, and the like; polysaccharides, such as raffinose, melezitose, maltodextrins, dextrans, starches, and the like; and alditols, such as mannitol, xylitol, maltitol, lactitol, xylitol sorbitol (glucitol), myoinositol and the like. Preferably, the carbohydrate excipients are mannitol, trehalose, and/or raffinose.

[0605] The compositions can also include a buffer or a pH-adjusting agent; typically, the buffer is a salt prepared from an organic acid or base. Representative buffers include organic acid salts, such as salts of citric acid, ascorbic acid, gluconic acid, carbonic acid, tartaric acid, succinic acid, acetic acid, or phthalic acid; Tris, tromethamine hydrochloride, or phosphate buffers. Preferred buffers are organic acid salts, such as citrate.

[0606] Additionally, the disclosed compositions can include polymeric excipients/additives, such as polyvinylpyrrolidones, ficolls (a polymeric sugar), dextrates (e.g., cyclodextrins, such as 2-hydroxypropyl-β-cyclodextrin), polyethylene glycols, flavoring agents, antimicrobial agents, sweeteners, antioxidants, antistatic agents, surfactants (e.g., polysorbates, such as “TWEEN 20” and “TWEEN 80”), lipids (e.g., phospholipids, fatty acids), steroids (e.g., cholesterol), and chelating agents (e.g., EDTA).

[0607] Many known and developed modes can be used for administering therapeutically effective amounts of the compositions or pharmaceutical compositions disclosed herein. Non-limiting examples of modes of administration include bolus, buccal, infusion, intrarticular, intrabronchial, intraabdominal, intracapsular, intracartilaginous, intracavitary, intracelial, intracerebellar, intracerebroventricular, intracolic, intracervical, intragastric, intrahepatic, intralesional, intramuscular, intramyocardial, intranasal, intraocular, intraosseous, intraosteal, intrapelvic, intrapericardiac, intraperitoneal, intrapleural, intraprostatic, intrapulmonary, intrarectal, intrarenal, intraretinal, intraspinal, intrasynovial, intrathoracic, intrauterine, intratumoral, intravenous, intravesical, oral, parenteral, rectal, sublingual, subcutaneous, transdermal or vaginal means.

[0608] A composition of the disclosure can be prepared for use for parenteral (subcutaneous, intramuscular or intravenous) or any other administration particularly in the form of liquid solutions or suspensions; for use in vaginal or rectal administration particularly in semisolid forms, such as, but not limited to, creams and suppositories; for buccal, or sublingual administration, such as, but not limited to, in the form of tablets or capsules; or intranasally, such as, but not limited to, the form of powders, nasal drops or aerosols or certain agents; or transdermally, such as not limited to a gel, ointment, lotion, suspension or patch delivery system with chemical enhancers such as dimethyl sulfoxide to either modify the skin structure or to increase the drug concentration in the transdermal patch (Junginger, et al. In “Drug Permeation Enhancement;” Hsieh, D. S., Eds., pp. 59-90 (Marcel Dekker, Inc. New York 1994,), or with oxidizing agents that enable the application of formulations containing proteins and peptides onto the skin (WO 98/53847), or applications of electric fields to create transient transport pathways, such as electroporation, or to increase the mobility of charged drugs through the skin, such as iontophoresis, or application of ultrasound, such as sonophoresis (U.S. Pat. Nos. 4,309,989 and 4,767,402) (the above publications and patents being entirely incorporated herein by reference).

[0609] For parenteral administration, any composition disclosed herein can be formulated as a solution, suspension, emulsion, particle, powder, or lyophilized powder in association, or separately provided, with a pharmaceutically acceptable parenteral vehicle. Formulations for parenteral administration can contain as common excipients sterile water or saline, polyalkylene glycols, such as polyethylene glycol, oils of vegetable origin, hydrogenated naphthalenes and the like. Aqueous or oily suspensions for injection can be prepared by using an appropriate emulsifier or humidifier and a suspending agent, according to known methods. Agents for injection can be a non-toxic, non-orally administrable diluting agent, such as aqueous solution, a sterile injectable solution or suspension in a solvent. As the usable vehicle or solvent, water, Ringer's solution, isotonic saline, etc. are allowed; as an ordinary solvent or suspending solvent, sterile involatile oil can be used. For these purposes, any kind of involatile oil and fatty acid can be used, including natural or synthetic or semisynthetic fatty oils or fatty acids; natural or synthetic or semisynthtetic mono— or di— or tri-glycerides. Parental administration is known in the art and includes, but is not limited to, conventional means of injections, a gas pressured needle-less injection device as described in U.S. Pat. No. 5,851,198, and a laser perforator device as described in U.S. Pat. No. 5,839,446.

[0610] Formulations for oral administration rely on the co-administration of adjuvants (e.g., resorcinols and nonionic surfactants, such as polyoxyethylene oleyl ether and n-hexadecylpolyethylene ether) to increase artificially the permeability of the intestinal walls, as well as the co-administration of enzymatic inhibitors (e.g., pancreatic trypsin inhibitors, diisopropylfluorophosphate (DFF) and trasylol) to inhibit enzymatic degradation. Formulations for delivery of hydrophilic agents including proteins and protein scaffolds and a combination of at least two surfactants intended for oral, buccal, mucosal, nasal, pulmonary, vaginal transmembrane, or rectal administration are described in U.S. Pat. No. 6,309,663. The active constituent compound of the solid-type dosage form for oral administration can be mixed with at least one additive, including sucrose, lactose, cellulose, mannitol, trehalose, raffinose, maltitol, dextran, starches, agar, arginates, chitins, chitosans, pectins, gum tragacanth, gum arabic, gelatin, collagen, casein, albumin, synthetic or semisynthetic polymer, and glyceride. These dosage forms can also contain other type(s) of additives, e.g., inactive diluting agent, lubricant, such as magnesium stearate, paraben, preserving agent, such as sorbic acid, ascorbic acid, .alpha.-tocopherol, antioxidant such as cysteine, disintegrator, binder, thickener, buffering agent, sweetening agent, flavoring agent, perfuming agent, etc.

[0611] Tablets and pills can be further processed into enteric-coated preparations. The liquid preparations for oral administration include emulsion, syrup, elixir, suspension and solution preparations allowable for medical use. These preparations can contain inactive diluting agents ordinarily used in said field, e.g., water. Liposomes have also been described as drug delivery systems for insulin and heparin (U.S. Pat. No. 4,239,754). More recently, microspheres of artificial polymers of mixed amino acids (proteinoids) have been used to deliver pharmaceuticals (U.S. Pat. No. 4,925,673). Furthermore, carrier compounds described in U.S. Pat. Nos. 5,879,681 and 5,871,753 and used to deliver biologically active agents orally are known in the art.

[0612] For pulmonary administration, preferably, a composition or pharmaceutical composition described herein is delivered in a particle size effective for reaching the lower airways of the lung or sinuses. The composition or pharmaceutical composition can be delivered by any of a variety of inhalation or nasal devices known in the art for administration of a therapeutic agent by inhalation. These devices capable of depositing aerosolized formulations in the sinus cavity or alveoli of a patient include metered dose inhalers, nebulizers (e.g., jet nebulizer, ultrasonic nebulizer), dry powder generators, sprayers, and the like. All such devices can use formulations suitable for the administration for the dispensing of a composition or pharmaceutical composition described herein in an aerosol. Such aerosols can be comprised of either solutions (both aqueous and non-aqueous) or solid particles. Additionally, a spray including a composition or pharmaceutical composition described herein can be produced by forcing a suspension or solution of at least one protein scaffold through a nozzle under pressure. In a metered dose inhaler (MDI), a propellant, a composition or pharmaceutical composition described herein, and any excipients or other additives are contained in a canister as a mixture including a liquefied compressed gas. Actuation of the metering valve releases the mixture as an aerosol, preferably containing particles in the size range of less than about 10 μm, preferably, about 1 μm to about 5 μm, and, most preferably, about 2 μm to about 3 μm. A more detailed description of pulmonary administration, formulations and related devices is disclosed in PCT Publication No. WO 2019/049816.

[0613] For absorption through mucosal surfaces, compositions include an emulsion comprising a plurality of submicron particles, a mucoadhesive macromolecule, a bioactive peptide, and an aqueous continuous phase, which promotes absorption through mucosal surfaces by achieving mucoadhesion of the emulsion particles (U.S. Pat. No. 5,514,670). Mucous surfaces suitable for application of the emulsions of the disclosure can include corneal, conjunctival, buccal, sublingual, nasal, vaginal, pulmonary, stomachic, intestinal, and rectal routes of administration. Formulations for vaginal or rectal administration, e.g., suppositories, can contain as excipients, for example, polyalkyleneglycols, vaseline, cocoa butter, and the like. Formulations for intranasal administration can be solid and contain as excipients, for example, lactose or can be aqueous or oily solutions of nasal drops. For buccal administration, excipients include sugars, calcium stearate, magnesium stearate, pregelinatined starch, and the like (U.S. Pat. No. 5,849,695). A more detailed description of mucosal administration and formulations is disclosed in PCT Publication No. WO 2019/049816.

[0614] For transdermal administration, a composition or pharmaceutical composition disclosed herein is encapsulated in a delivery device, such as a liposome or polymeric nanoparticles, microparticle, microcapsule, or microspheres (referred to collectively as microparticles unless otherwise stated). A number of suitable devices are known, including microparticles made of synthetic polymers, such as polyhydroxy acids, such as polylactic acid, polyglycolic acid and copolymers thereof, polyorthoesters, polyanhydrides, and polyphosphazenes, and natural polymers, such as collagen, polyamino acids, albumin and other proteins, alginate and other polysaccharides, and combinations thereof (U.S. Pat. No. 5,814,599). A more detailed description of transdermal administration, formulations and suitable devices is disclosed in PCT Publication No. WO 2019/049816.

[0615] It can be desirable to deliver the disclosed compounds to the subject over prolonged periods of time, for example, for periods of one week to one year from a single administration. Various slow release, depot or implant dosage forms can be utilized. For example, a dosage form can contain a pharmaceutically acceptable non-toxic salt of the compounds that has a low degree of solubility in body fluids, for example, (a) an acid addition salt with a polybasic acid, such as phosphoric acid, sulfuric acid, citric acid, tartaric acid, tannic acid, pamoic acid, alginic acid, polyglutamic acid, naphthalene mono— or di— sulfonic acids, polygalacturonic acid, and the like; (b) a salt with a polyvalent metal cation, such as zinc, calcium, bismuth, barium, magnesium, aluminum, copper, cobalt, nickel, cadmium and the like, or with an organic cation formed from e.g., N,N′-dibenzyl-ethylenediamine or ethylenediamine; or (c) combinations of (a) and (b), e.g., a zinc tannate salt. Additionally, the disclosed compounds or, preferably, a relatively insoluble salt, such as those just described, can be formulated in a gel, for example, an aluminum monostearate gel with, e.g., sesame oil, suitable for injection. Particularly preferred salts are zinc salts, zinc tannate salts, pamoate salts, and the like. Another type of slow release depot formulation for injection would contain the compound or salt dispersed for encapsulation in a slow degrading, non-toxic, non-antigenic polymer, such as a polylactic acid/polyglycolic acid polymer for example as described in U.S. Pat. No. 3,773,919. The compounds or, preferably, relatively insoluble salts, such as those described above, can also be formulated in cholesterol matrix silastic pellets, particularly for use in animals. Additional slow release, depot or implant formulations, e.g., gas or liquid liposomes, are known in the literature (U.S. Pat. No. 5,770,222 and “Sustained and Controlled Release Drug Delivery Systems”, J. R. Robinson ed., Marcel Dekker, Inc., N.Y., 1978).

[0616] Suitable dosages are well known in the art. See, e.g., Wells et al., eds., Pharmacotherapy Handbook, 2nd Edition, Appleton and Lange, Stamford, Conn. (2000); PDR Pharmacopoeia, Tarascon Pocket Pharmacopoeia 2000, Deluxe Edition, Tarascon Publishing, Loma Linda, Calif (2000); Nursing 2001 Handbook of Drugs, 21st edition, Springhouse Corp., Springhouse, Pa., 2001; Health Professional's Drug Guide 2001, ed., Shannon, Wilson, Stang, Prentice-Hall, Inc, Upper Saddle River, N.J. Preferred doses can optionally include about 0.1-99 and/or 100-500 mg/kg/administration, or any range, value or fraction thereof, or to achieve a serum concentration of about 0.1-5000 μg/ml serum concentration per single or multiple administration, or any range, value or fraction thereof. A preferred dosage range for the compositions or pharmaceutical compositions disclosed herein is from about 1 mg/kg, up to about 3, about 6 or about 12 mg/kg of body weight of the subject.

[0617] Alternatively, the dosage administered can vary depending upon known factors, such as the pharmacodynamic characteristics of the particular agent, and its mode and route of administration; age, health, and weight of the recipient; nature and extent of symptoms, kind of concurrent treatment, frequency of treatment, and the effect desired. Usually a dosage of active ingredient can be about 0.1 to 100 milligrams per kilogram of body weight. Ordinarily 0.1 to 50, and preferably, 0.1 to 10 milligrams per kilogram per administration or in sustained release form is effective to obtain desired results.

[0618] As a non-limiting example, treatment of humans or animals can be provided as a one-time or periodic dosage of the compositions or pharmaceutical compositions disclosed herein about 0.1 to 100 mg/kg or any range, value or fraction thereof per day, on at least one of day 1-40, or, alternatively or additionally, at least one of week 1-52, or, alternatively or additionally, at least one of 1-20 years, or any combination thereof, using single, infusion or repeated doses.

[0619] Dosage forms suitable for internal administration generally contain from about 0.001 milligram to about 500 milligrams of active ingredient per unit or container. In these pharmaceutical compositions the active ingredient will ordinarily be present in an amount of about 0.5-99.999% by weight based on the total weight of the composition.

[0620] An effective amount can comprise an amount of about 0.001 to about 500 mg/kg per single (e.g., bolus), multiple or continuous administration, or to achieve a serum concentration of 0.01-5000 μg/ml serum concentration per single, multiple, or continuous administration, or any effective range or value therein, as done and determined using known methods, as described herein or known in the relevant arts.

[0621] In aspects where the compositions to be administered to a subject in need thereof are modified cells as disclosed herein, the cells can be administered between about 1×10³ and 1×10¹⁵ cells; about 1×10⁴ and 1×10¹² cells; about 1×10⁵ and 1×10¹⁰ cells; about 1×10⁶ and 1×10⁹ cells; about 1×10⁶ and 1×10⁸ cells; about 1×10⁶ and 1×10⁷ cells; or about 1×10⁶ and 25×10⁶ cells. In one aspect the cells are administered between about 5×10⁶ and 25×10⁶ cells.

[0622] A more detailed description of pharmaceutically acceptable excipients, formulations, dosages and methods of administration of the disclosed compositions and pharmaceutical compositions is disclosed in PCT Publication No. WO 2019/049816.

[0623] Methods of Using the Compositions of the Disclosure

[0624] The disclosure provides the use of a disclosed composition or pharmaceutical composition for the treatment of a disease or disorder in a cell, tissue, organ, animal, or subject, as known in the art or as described herein, using the disclosed compositions and pharmaceutical compositions, e.g., administering or contacting the cell, tissue, organ, animal, or subject with a therapeutic effective amount of the composition or pharmaceutical composition. In one aspect, the subject is a mammal. Preferably, the subject is human. The terms “subject” and “patient” are used interchangeably herein.

[0625] The disclosure provides a method for modulating or treating at least one malignant disease or disorder in a cell, tissue, organ, animal or subject. Preferably, the malignant disease is cancer. Non-limiting examples of a malignant disease or disorder include leukemia, acute leukemia, acute lymphoblastic leukemia (ALL), acute lymphocytic leukemia, B-cell, T-cell or FAB ALL, acute myeloid leukemia (AML), acute myelogenous leukemia, chronic myelocytic leukemia (CML), chronic lymphocytic leukemia (CLL), hairy cell leukemia, myelodysplastic syndrome (MDS), a lymphoma, Hodgkin's disease, a malignant lymphoma, non-Hodgkin's lymphoma, Burkitt's lymphoma, multiple myeloma, Kaposi's sarcoma, colorectal carcinoma, pancreatic carcinoma, nasopharyngeal carcinoma, malignant histiocytosis, paraneoplastic syndrome/hypercalcemia of malignancy, solid tumors, bladder cancer, breast cancer, colorectal cancer, endometrial cancer, head cancer, neck cancer, hereditary nonpolyposis cancer, Hodgkin's lymphoma, liver cancer, lung cancer, non-small cell lung cancer, ovarian cancer, pancreatic cancer, prostate cancer, renal cell carcinoma, testicular cancer, adenocarcinomas, sarcomas, malignant melanoma, hemangioma, metastatic disease, cancer related bone resorption, cancer related bone pain, and the like.

[0626] In preferred aspects, the treatment of a malignant disease or disorder comprises adoptive cell therapy. For example, in one aspect, the disclosure provides modified cells that express at least one disclosed antibody (e.g., scFv) and/or CAR comprising an antibody (e.g., scFv) that have been selected and/or expanded for administration to a subject in need thereof. Modified cells can be formulated for storage at any temperature including room temperature and body temperature. Modified cells can be formulated for cryopreservation and subsequent thawing. Modified cells can be formulated in a pharmaceutically acceptable carrier for direct administration to a subject from sterile packaging. Modified cells can be formulated in a pharmaceutically acceptable carrier with an indicator of cell viability and/or CAR expression level to ensure a minimal level of cell function and CAR expression. Modified cells can be formulated in a pharmaceutically acceptable carrier at a prescribed density with one or more reagents to inhibit further expansion and/or prevent cell death.

[0627] Any can comprise administering an effective amount of any composition or pharmaceutical composition disclosed herein to a cell, tissue, organ, animal or subject in need of such modulation, treatment or therapy. Such a method can optionally further comprise co-administration or combination therapy for treating such diseases or disorders, wherein the administering of any composition or pharmaceutical composition disclosed herein, further comprises administering, before concurrently, and/or after, at least one chemotherapeutic agent (e.g., an alkylating agent, an a mitotic inhibitor, a radiopharmaceutical).

[0628] In some aspects, the subject does not develop graft vs. host (GvH) and/or host vs. graft (HvG) following administration. In one aspect, the administration is systemic. Systemic administration can be any means known in the art and described in detail herein. Preferably, systemic administration is by an intravenous injection or an intravenous infusion. In one aspect, the administration is local. Local administration can be any means known in the art and described in detail herein. Preferably, local administration is by intra-tumoral injection or infusion, intraspinal injection or infusion, intracerebroventricular injection or infusion, intraocular injection or infusion, or intraosseous injection or infusion.

[0629] In some aspects, the therapeutically effective dose is a single dose. In some aspects, the single dose is one of at least 2, 5, 10, 15, 20, 25, 30, 35, 40, 45, 50, 55, 60, 65, 70, 75, 80, 85, 90, 95, 100 or any number of doses in between that are manufactured simultaneously. In some aspects, where the composition is autologous cells or allogeneic cells, the dose is an amount sufficient for the cells to engraft and/or persist for a sufficient time to treat the disease or disorder.

[0630] In one example, the disclosure provides a method of treating cancer in a subject in need thereof, comprising administering to the subject a composition comprising an antibody (e.g., scFv) or a CAR comprising an antibody (e.g., scFv) the antibody or CAR specifically binds to an antigen on a tumor cell. In aspects where the composition comprises a modified cell or cell population, the cell or cell population may be autologous or allogeneic.

[0631] In some aspects of the methods of treatment described herein, the treatment can be modified or terminated. Specifically, in aspects where the composition used for treatment comprises an inducible proapoptotic polypeptide, apoptosis may be selectively induced in the cell by contacting the cell with an induction agent. A treatment may be modified or terminated in response to, for example, a sign of recovery or a sign of decreasing disease severity/progression, a sign of disease remission/cessation, and/or the occurrence of an adverse event. In some aspects, the method comprises the step of administering an inhibitor of the induction agent to inhibit modification of the cell therapy, thereby restoring the function and/or efficacy of the cell therapy (for example, when a sign or symptom of the disease reappear or increase in severity and/or an adverse event is resolved).

[0632] Antibody/scFv Production, Screening and Purification

[0633] At least one antibody (e.g., monoclonal antibody, a chimeric antibody, a single domain antibody, a VHH, a VH, a single chain variable fragment (scFv), an antigen-binding fragment (Fab) or a Fab fragment) of the disclosure can be optionally produced by a cell line, a mixed cell line, an immortalized cell or clonal population of immortalized cells, as well known in the art. See, e.g., Ausubel, et al., ed., Current Protocols in Molecular Biology, John Wiley & Sons, Inc., NY, N.Y. (1987-2001); Sambrook, et al., Molecular Cloning: A Laboratory Manual, 2nd Edition, Cold Spring Harbor, N.Y. (1989); Harlow and Lane, Antibodies, a Laboratory Manual, Cold Spring Harbor, N.Y. (1989); Colligan, et al., eds., Current Protocols in Immunology, John Wiley & Sons, Inc., NY (1994-2001); Colligan et al., Current Protocols in Protein Science, John Wiley & Sons, NY, N.Y., (1997-2001).

[0634] Amino acids from an scFv can be altered, added and/or deleted to reduce immunogenicity or reduce, enhance or modify binding, affinity, on-rate, off-rate, avidity, specificity, half-life, stability, solubility or any other suitable characteristic, as known in the art.

[0635] Optionally, an scFv can be engineered with retention of high affinity for the antigen and other favorable biological properties. To achieve this goal, the scaffold proteins can be optionally prepared by a process of analysis of the parental sequences and various conceptual engineered products using three-dimensional models of the parental and engineered sequences. Three-dimensional models are commonly available and are familiar to those skilled in the art. Computer programs are available which illustrate and display probable three-dimensional conformational structures of selected candidate sequences and can measure possible immunogenicity (e.g., Immunofilter program of Xencor, Inc. of Monrovia, Calif). Inspection of these displays permits analysis of the likely role of the residues in the functioning of the candidate sequence, i.e., the analysis of residues that influence the ability of the candidate scFv to bind its antigen. In this way, residues can be selected and combined from the parent and reference sequences so that the desired characteristic, such as affinity for the target antigen(s), is achieved. Alternatively, or in addition to, the above procedures, other suitable methods of engineering can be used.

[0636] Screening of an scFv for specific binding to similar proteins or fragments can be conveniently achieved using nucleotide (DNA or RNA display) or peptide display libraries, for example, in vitro display. This method involves the screening of large collections of peptides for individual members having the desired function or structure. The displayed nucleotide or peptide sequences can be from 3 to 5000 or more nucleotides or amino acids in length, frequently from 5-100 amino acids long, and often from about 8 to 25 amino acids long. In addition to direct chemical synthetic methods for generating peptide libraries, several recombinant DNA methods have been described. One type involves the display of a peptide sequence on the surface of a bacteriophage or cell. Each bacteriophage or cell contains the nucleotide sequence encoding the particular displayed peptide sequence. Such methods are described in PCT Patent Publication Nos. WO 91/185, WO 91/18980, WO 91/19818, and WO 93/08278.

[0637] Other systems for generating libraries of peptides have aspects of both in vitro chemical synthesis and recombinant methods. See, PCT Patent Publication Nos. WO 92/05258, WO 92/14843, and WO 96/19256. See also, U.S. Pat. Nos. 5,658,754; and 5,643,768. Peptide display libraries, vector, and screening kits are commercially available from such suppliers as Invitrogen (Carlsbad, Calif.), and Cambridge Antibody Technologies (Cambridgeshire, UK). See, e.g., U.S. Pat. Nos. 4,704,692, 4,939,666, 4,946,778, 5,260,203, 5,455,030, 5,518,889, 5,534,621, 5,656,730, 5,763,733, 5,767,260, 5,856,456, assigned to Enzon; U.S. Pat. Nos. 5,223,409, 5,403,484, 5,571,698, 5,837,500, assigned to Dyax, U.S. Pat. Nos. 5,427,908, 5,580,717, assigned to Affymax; 5,885,793, assigned to Cambridge Antibody Technologies; 5,750,373, assigned to Genentech, U.S. Pat. Nos. 5,618,920, 5,595,898, 5,576,195, 5,698,435, 5,693,493, 5,698,417, assigned to Xoma, Colligan, supra; Ausubel, supra; or Sambrook, supra.

[0638] An scFv of the disclosure can bind human or other mammalian proteins with a wide range of affinities (KD). In a preferred aspect, at least one scFv of the present disclosure can optionally bind to a target protein with high affinity, for example, with a KD equal to or less than about 10⁻⁷M, such as but not limited to, 0.1-9.9 (or any range or value therein)×10⁻⁸, 10⁻⁹, 10⁻¹⁰, 10⁻¹¹, 10⁻¹², 10⁻¹³, 10⁻¹⁴, 10⁻¹⁵ or any range or value therein, as determined by surface plasmon resonance or the Kinexa method, as practiced by those of skill in the art.

[0639] The affinity or avidity of a scFv for an antigen can be determined experimentally using any suitable method. (See, for example, Berzofsky, et al., “Antibody-Antigen Interactions,” In Fundamental Immunology, Paul, W. E., Ed., Raven Press: New York, N.Y. (1984); Kuby, Janis Immunology, W. H. Freeman and Company: New York, N.Y. (1992); and methods described herein). The measured affinity of a particular scFv-antigen interaction can vary if measured under different conditions (e.g., salt concentration, pH). Thus, measurements of affinity and other antigen-binding parameters (e.g., K D, Kon, Koff) are preferably made with standardized solutions of protein scaffold and antigen, and a standardized buffer, such as the buffer described herein.

[0640] Competitive assays can be performed with the scFv of the disclosure in order to determine what proteins, antibodies, and other antagonists compete for binding to a target protein with the scFv of the present disclosure and/or share the epitope region. These assays as readily known to those of ordinary skill in the art evaluate competition between antagonists or ligands for a limited number of binding sites on a protein. The protein and/or antibody is immobilized or insolubilized before or after the competition and the sample bound to the target protein is separated from the unbound sample, for example, by decanting (where the protein/antibody was pre-insolubilized) or by centrifuging (where the protein/antibody was precipitated after the competitive reaction). Also, the competitive binding may be determined by whether function is altered by the binding or lack of binding of the scFv to the target protein, e.g., whether the scFv molecule inhibits or potentiates the enzymatic activity of, for example, a label. ELISA and other functional assays may be used, as well known in the art.

[0641] Nucleic Acid Molecules

[0642] Nucleic acid molecules of the disclosure encoding an scFv can be in the form of RNA, such as mRNA, hnRNA, tRNA or any other form, or in the form of DNA, including, but not limited to, cDNA and genomic DNA obtained by cloning or produced synthetically, or any combinations thereof. The DNA can be triple-stranded, double-stranded or single-stranded, or any combination thereof. Any portion of at least one strand of the DNA or RNA can be the coding strand, also known as the sense strand, or it can be the non-coding strand, also referred to as the anti-sense strand.

[0643] Isolated nucleic acid molecules of the disclosure can include nucleic acid molecules comprising an open reading frame (ORF), optionally, with one or more introns, e.g., but not limited to, at least one specified portion of at least one scFv; nucleic acid molecules comprising the coding sequence for a protein scaffold or loop region that binds to the target protein; and nucleic acid molecules which comprise a nucleotide sequence substantially different from those described above but which, due to the degeneracy of the genetic code, still encode the protein scaffold as described herein and/or as known in the art. Of course, the genetic code is well known in the art. Thus, it would be routine for one skilled in the art to generate such degenerate nucleic acid variants that code for a specific scFv of the present disclosure. See, e.g., Ausubel, et al., supra, and such nucleic acid variants are included in the present disclosure.

[0644] As indicated herein, nucleic acid molecules of the disclosure which comprise a nucleic acid encoding a scFv can include, but are not limited to, those encoding the amino acid sequence of a scFv fragment, by itself; the coding sequence for the entire protein scaffold or a portion thereof; the coding sequence for a scFv, fragment or portion, as well as additional sequences, such as the coding sequence of at least one signal leader or fusion peptide, with or without the aforementioned additional coding sequences, such as at least one intron, together with additional, non-coding sequences, including but not limited to, non-coding 5′ and 3′ sequences, such as the transcribed, non-translated sequences that play a role in transcription, mRNA processing, including splicing and polyadenylation signals (for example, ribosome binding and stability of mRNA); an additional coding sequence that codes for additional amino acids, such as those that provide additional functionalities. Thus, the sequence encoding a protein scaffold can be fused to a marker sequence, such as a sequence encoding a peptide that facilitates purification of the fused protein scaffold comprising a protein scaffold fragment or portion.

[0645] Polynucleotides Selectively Hybridizing to Polynucleotide as Described Herein

[0646] The disclosure provides isolated nucleic acids that hybridize under selective hybridization conditions to a polynucleotide disclosed herein. Thus, the polynucleotides can be used for isolating, detecting, and/or quantifying nucleic acids comprising such polynucleotides. For example, polynucleotides of the present disclosure can be used to identify, isolate, or amplify partial or full-length clones in a deposited library. The polynucleotides can be genomic or cDNA sequences isolated, or otherwise complementary to, a cDNA from a human or mammalian nucleic acid library.

[0647] Preferably, the cDNA library comprises at least 80% full-length sequences, preferably, at least 85% or 90% full-length sequences, and, more preferably, at least 95% full-length sequences. The cDNA libraries can be normalized to increase the representation of rare sequences. Low or moderate stringency hybridization conditions are typically, but not exclusively, employed with sequences having a reduced sequence identity relative to complementary sequences. Moderate and high stringency conditions can optionally be employed for sequences of greater identity. Low stringency conditions allow selective hybridization of sequences having about 70% sequence identity and can be employed to identify orthologous or paralogous sequences.

[0648] Optionally, polynucleotides will encode at least a portion of a protein scaffold encoded by the polynucleotides described herein. The polynucleotides embrace nucleic acid sequences that can be employed for selective hybridization to a polynucleotide encoding a protein scaffold of the present disclosure. See, e.g., Ausubel, supra; Colligan, supra, each entirely incorporated herein by reference.

[0649] Construction of Nucleic Acids

[0650] The isolated nucleic acids of the disclosure can be made using (a) recombinant methods, (b) synthetic techniques, (c) purification techniques, and/or (d) combinations thereof, as well-known in the art.

[0651] The nucleic acids can conveniently comprise nucleotide sequences in addition to a polynucleotide of the present disclosure. For example, a multi-cloning site comprising one or more endonuclease restriction sites can be inserted into the nucleic acid to aid in isolation of the polynucleotide. Also, translatable sequences can be inserted to aid in the isolation of the translated polynucleotide of the disclosure. For example, a hexa-histidine marker sequence provides a convenient means to purify the proteins of the disclosure. The nucleic acid of the disclosure, excluding the coding sequence, is optionally a vector, adapter, or linker for cloning and/or expression of a polynucleotide of the disclosure.

[0652] Additional sequences can be added to such cloning and/or expression sequences to optimize their function in cloning and/or expression, to aid in isolation of the polynucleotide, or to improve the introduction of the polynucleotide into a cell. Use of cloning vectors, expression vectors, adapters, and linkers is well known in the art. (See, e.g., Ausubel, supra; or Sambrook, supra).

[0653] Recombinant Methods for Constructing Nucleic Acids

[0654] The isolated nucleic acid compositions of this disclosure, such as RNA, cDNA, genomic DNA, or any combination thereof, can be obtained from biological sources using any number of cloning methodologies known to those of skill in the art. In some aspects, oligonucleotide probes that selectively hybridize, under stringent conditions, to the polynucleotides of the present disclosure are used to identify the desired sequence in a cDNA or genomic DNA library. The isolation of RNA, and construction of cDNA and genomic libraries are well known to those of ordinary skill in the art. (See, e.g., Ausubel, supra; or Sambrook, supra).

[0655] Nucleic Acid Screening and Isolation Methods

[0656] A cDNA or genomic library can be screened using a probe based upon the sequence of a polynucleotide of the disclosure. Probes can be used to hybridize with genomic DNA or cDNA sequences to isolate homologous genes in the same or different organisms. Those of skill in the art will appreciate that various degrees of stringency of hybridization can be employed in the assay; and either the hybridization or the wash medium can be stringent. As the conditions for hybridization become more stringent, there must be a greater degree of complementarity between the probe and the target for duplex formation to occur. The degree of stringency can be controlled by one or more of temperature, ionic strength, pH and the presence of a partially denaturing solvent, such as formamide. For example, the stringency of hybridization is conveniently varied by changing the polarity of the reactant solution through, for example, manipulation of the concentration of formamide within the range of 0% to 50%. The degree of complementarity (sequence identity) required for detectable binding will vary in accordance with the stringency of the hybridization medium and/or wash medium. The degree of complementarity will optimally be 100%, or 70-100%, or any range or value therein. However, it should be understood that minor sequence variations in the probes and primers can be compensated for by reducing the stringency of the hybridization and/or wash medium.

[0657] Methods of amplification of RNA or DNA are well known in the art and can be used according to the disclosure without undue experimentation, based on the teaching and guidance presented herein.

[0658] Known methods of DNA or RNA amplification include, but are not limited to, polymerase chain reaction (PCR) and related amplification processes (see, e.g., U.S. Pat. Nos. 4,683,195, 4,683,202, 4,800,159, 4,965,188, to Mullis, et al.; 4,795,699 and 4,921,794 to Tabor, et al; U.S. Pat. No. 5,142,033 to Innis; U.S. Pat. No. 5,122,464 to Wilson, et al.; U.S. Pat. No. 5,091,310 to Innis; U.S. Pat. No. 5,066,584 to Gyllensten, et al; U.S. Pat. No. 4,889,818 to Gelfand, et al; U.S. Pat. No. 4,994,370 to Silver, et al; U.S. Pat. No. 4,766,067 to Biswas; U.S. Pat. No. 4,656,134 to Ringold) and RNA mediated amplification that uses anti-sense RNA to the target sequence as a template for double-stranded DNA synthesis (U.S. Pat. No. 5,130,238 to Malek, et al, with the tradename NASBA), the entire contents of which references are incorporated herein by reference. (See, e.g., Ausubel, supra; or Sambrook, supra.)

[0659] For instance, polymerase chain reaction (PCR) technology can be used to amplify the sequences of polynucleotides of the disclosure and related genes directly from genomic DNA or cDNA libraries. PCR and other in vitro amplification methods can also be useful, for example, to clone nucleic acid sequences that code for proteins to be expressed, to make nucleic acids to use as probes for detecting the presence of the desired mRNA in samples, for nucleic acid sequencing, or for other purposes. Examples of techniques sufficient to direct persons of skill through in vitro amplification methods are found in Berger, supra, Sambrook, supra, and Ausubel, supra, as well as Mullis, et al., U.S. Pat. No. 4,683,202 (1987); and Innis, et al., PCR Protocols A Guide to Methods and Applications, Eds., Academic Press Inc., San Diego, Calif (1990). Commercially available kits for genomic PCR amplification are known in the art. See, e.g., Advantage-GC Genomic PCR Kit (Clontech). Additionally, e.g., the T4 gene 32 protein (Boehringer Mannheim) can be used to improve yield of long PCR products.

[0660] Synthetic Methods for Constructing Nucleic Acids

[0661] The isolated nucleic acids of the disclosure can also be prepared by direct chemical synthesis by known methods (see, e.g., Ausubel, et al., supra). Chemical synthesis generally produces a single-stranded oligonucleotide, which can be converted into double-stranded DNA by hybridization with a complementary sequence, or by polymerization with a DNA polymerase using the single strand as a template. One of skill in the art will recognize that while chemical synthesis of DNA can be limited to sequences of about 100 or more bases, longer sequences can be obtained by the ligation of shorter sequences.

[0662] Recombinant Expression Cassettes

[0663] The disclosure further provides recombinant expression cassettes comprising a nucleic acid of the disclosure. A nucleic acid sequence of the disclosure, for example, a cDNA or a genomic sequence encoding a protein scaffold of the disclosure, can be used to construct a recombinant expression cassette that can be introduced into at least one desired host cell. A recombinant expression cassette will typically comprise a polynucleotide of the disclosure operably linked to transcriptional initiation regulatory sequences that will direct the transcription of the polynucleotide in the intended host cell. Both heterologous and non-heterologous (i.e., endogenous) promoters can be employed to direct expression of the nucleic acids of the disclosure.

[0664] In some aspects, isolated nucleic acids that serve as promoter, enhancer, or other elements can be introduced in the appropriate position (upstream, downstream or in the intron) of a non-heterologous form of a polynucleotide of the disclosure so as to up or down regulate expression of a polynucleotide of the disclosure. For example, endogenous promoters can be altered in vivo or in vitro by mutation, deletion and/or substitution.

[0665] Expression Vectors and Host Cells

[0666] The disclosure also relates to vectors that include isolated nucleic acid molecules of the disclosure, host cells that are genetically engineered with the recombinant vectors, and the production of at least one protein scaffold by recombinant techniques, as is well known in the art. See, e.g., Sambrook, et al., supra; Ausubel, et al., supra, each entirely incorporated herein by reference.

[0667] The polynucleotides can optionally be joined to a vector containing a selectable marker for propagation in a host. Generally, a plasmid vector is introduced in a precipitate, such as a calcium phosphate precipitate, or in a complex with a charged lipid. If the vector is a virus, it can be packaged in vitro using an appropriate packaging cell line and then transduced into host cells.

[0668] The DNA insert should be operatively linked to an appropriate promoter. The expression constructs will further contain sites for transcription initiation, termination and, in the transcribed region, a ribosome binding site for translation. The coding portion of the mature transcripts expressed by the constructs will preferably include a translation initiating at the beginning and a termination codon (e.g., UAA, UGA or UAG) appropriately positioned at the end of the mRNA to be translated, with UAA and UAG preferred for mammalian or eukaryotic cell expression.

[0669] Expression vectors will preferably but optionally include at least one selectable marker. Such markers include, e.g., but are not limited to, ampicillin, zeocin (Sh bla gene), puromycin (pac gene), hygromycin B (hygB gene), G418/Geneticin (neo gene), DHFR (encoding Dihydrofolate Reductase and conferring resistance to Methotrexate), mycophenolic acid, or glutamine synthetase (GS, U.S. Pat. Nos. 5,122,464; 5,770,359; 5,827,739), blasticidin (bsd gene), resistance genes for eukaryotic cell culture as well as ampicillin, zeocin (Sh bla gene), puromycin (pac gene), hygromycin B (hygB gene), G418/Geneticin (neo gene), kanamycin, spectinomycin, streptomycin, carbenicillin, bleomycin, erythromycin, polymyxin B, or tetracycline resistance genes for culturing in E. coli and other bacteria or prokaryotics (the above patents are entirely incorporated hereby by reference). Appropriate culture mediums and conditions for the above-described host cells are known in the art. Suitable vectors will be readily apparent to the skilled artisan. Introduction of a vector construct into a host cell can be effected by calcium phosphate transfection, DEAE-dextran mediated transfection, cationic lipid-mediated transfection, electroporation, transduction, infection or other known methods. Such methods are described in the art, such as Sambrook, supra, Chapters 1-4 and 16-18; Ausubel, supra, Chapters 1, 9, 13, 15, 16.

[0670] Expression vectors will preferably but optionally include at least one selectable cell surface marker for isolation of cells modified by the compositions and methods of the disclosure. Selectable cell surface markers of the disclosure comprise surface proteins, glycoproteins, or group of proteins that distinguish a cell or subset of cells from another defined subset of cells. Preferably the selectable cell surface marker distinguishes those cells modified by a composition or method of the disclosure from those cells that are not modified by a composition or method of the disclosure. Such cell surface markers include, e.g., but are not limited to, “cluster of designation” or “classification determinant” proteins (often abbreviated as “CD”) such as a truncated or full length form of CD19, CD271, CD34, CD22, CD20, CD33, CD52, or any combination thereof. Cell surface markers further include the suicide gene marker RQR8 (Philip B et al. Blood. 2014 Aug 21; 124(8):1277-87).

[0671] Expression vectors will preferably but optionally include at least one selectable drug resistance marker for isolation of cells modified by the compositions and methods of the disclosure. Selectable drug resistance markers of the disclosure may comprise wild-type or mutant Neo, DHFR, TYMS, FRANCF, RAD51C, GCS, MDR1, ALDH1, NKX2.2, or any combination thereof.

[0672] At least one protein scaffold of the disclosure can be expressed in a modified form, such as a fusion protein, and can include not only secretion signals, but also additional heterologous functional regions. For instance, a region of additional amino acids, particularly charged amino acids, can be added to the N-terminus of a protein scaffold to improve stability and persistence in the host cell, during purification, or during subsequent handling and storage. Also, peptide moieties can be added to a protein scaffold of the disclosure to facilitate purification. Such regions can be removed prior to final preparation of a protein scaffold or at least one fragment thereof. Such methods are described in many standard laboratory manuals, such as Sambrook, supra, Chapters 17.29-17.42 and 18.1-18.74; Ausubel, supra, Chapters 16, 17 and 18.

[0673] Those of ordinary skill in the art are knowledgeable in the numerous expression systems available for expression of a nucleic acid encoding a protein of the disclosure. Alternatively, nucleic acids of the disclosure can be expressed in a host cell by turning on (by manipulation) in a host cell that contains endogenous DNA encoding a protein scaffold of the disclosure. Such methods are well known in the art, e.g., as described in U.S. Pat. Nos. 5,580,734, 5,641,670, 5,733,746, and 5,733,761, entirely incorporated herein by reference.

[0674] Illustrative of cell cultures useful for the production of the protein scaffolds, specified portions or variants thereof, are bacterial, yeast, and mammalian cells as known in the art. Mammalian cell systems often will be in the form of monolayers of cells although mammalian cell suspensions or bioreactors can also be used. A number of suitable host cell lines capable of expressing intact glycosylated proteins have been developed in the art, and include the COS-1 (e.g., ATCC CRL 1650), COS-7 (e.g., ATCC CRL-1651), HEK293, BHK21 (e.g., ATCC CRL-10), CHO (e.g., ATCC CRL 1610) and BSC-1 (e.g., ATCC CRL-26) cell lines, Cos-7 cells, CHO cells, hep G2 cells, P3X63Ag8.653, SP2/0-Ag14, 293 cells, HeLa cells and the like, which are readily available from, for example, American Type Culture Collection, Manassas, Va. (www.atcc.org). Preferred host cells include cells of lymphoid origin, such as myeloma and lymphoma cells. Particularly preferred host cells are P3X63Ag8.653 cells (ATCC Accession Number CRL-1580) and SP2/0-Ag14 cells (ATCC Accession Number CRL-1851). In a preferred aspect, the recombinant cell is a P3X63Ab8.653 or an SP2/0-Ag14 cell.

[0675] Expression vectors for these cells can include one or more of the following expression control sequences, such as, but not limited to, an origin of replication; a promoter (e.g., late or early SV40 promoters, the CMV promoter (U.S. Pat. Nos. 5,168,062; 5,385,839), an HSV tk promoter, a pgk (phosphoglycerate kinase) promoter, an EF-1 alpha promoter (U.S. Pat. No. 5,266,491), at least one human promoter; an enhancer, and/or processing information sites, such as ribosome binding sites, RNA splice sites, polyadenylation sites (e.g., an SV40 large T Ag poly A addition site), and transcriptional terminator sequences. See, e.g., Ausubel et al., supra; Sambrook, et al., supra. Other cells useful for production of nucleic acids or proteins of the present disclosure are known and/or available, for instance, from the American Type Culture Collection Catalogue of Cell Lines and Hybridomas (www.atcc.org) or other known or commercial sources.

[0676] When eukaryotic host cells are employed, polyadenylation or transcription terminator sequences are typically incorporated into the vector. An example of a terminator sequence is the polyadenylation sequence from the bovine growth hormone gene. Sequences for accurate splicing of the transcript can also be included. An example of a splicing sequence is the VP1 intron from SV40 (Sprague, et al., J. Virol. 45:773-781 (1983)). Additionally, gene sequences to control replication in the host cell can be incorporated into the vector, as known in the art.

[0677] scFv Purification

[0678] An scFv can be recovered and purified from recombinant cell cultures by well-known methods including, but not limited to, protein A purification, ammonium sulfate or ethanol precipitation, acid extraction, anion or cation exchange chromatography, phosphocellulose chromatography, hydrophobic interaction chromatography, affinity chromatography, hydroxylapatite chromatography and lectin chromatography. High performance liquid chromatography (“HPLC”) can also be employed for purification. See, e.g., Colligan, Current Protocols in Immunology, or Current Protocols in Protein Science, John Wiley & Sons, NY, N.Y., (1997-2001), e.g., Chapters 1, 4, 6, 8, 9, 10, each entirely incorporated herein by reference.

[0679] An scFv of the disclosure include purified products, products of chemical synthetic procedures, and products produced by recombinant techniques from a prokaryotic or eukaryotic host, including, for example, E. coli, yeast, higher plant, insect and mammalian cells. Depending upon the host employed in a recombinant production procedure, the protein scaffold of the disclosure can be glycosylated or can be non-glycosylated. Such methods are described in many standard laboratory manuals, such as Sambrook, supra, Sections 17.37-17.42; Ausubel, supra, Chapters 10, 12, 13, 16, 18 and 20, Colligan, Protein Science, supra, Chapters 12-14, all entirely incorporated herein by reference.

[0680] Amino Acid Codes

[0681] The amino acids that make up protein scaffolds of the disclosure are often abbreviated. The amino acid designations can be indicated by designating the amino acid by its single letter code, its three letter code, name, or three nucleotide codon(s) as is well understood in the art (see Alberts, B., et al., Molecular Biology of The Cell, Third Ed., Garland Publishing, Inc., New York, 1994). A protein scaffold of the disclosure can include one or more amino acid substitutions, deletions or additions, from spontaneous or mutations and/or human manipulation, as specified herein. Amino acids in a protein scaffold of the disclosure that are essential for function can be identified by methods known in the art, such as site-directed mutagenesis or alanine-scanning mutagenesis (e.g., Ausubel, supra, Chapters 8, 15; Cunningham and Wells, Science 244:1081-1085 (1989)). The latter procedure introduces single alanine mutations at every residue in the molecule. The resulting mutant molecules are then tested for biological activity, such as, but not limited to, at least one neutralizing activity. Sites that are critical for protein scaffold binding can also be identified by structural analysis, such as crystallization, nuclear magnetic resonance or photoaffinity labeling (Smith, et al., J. Mol. Biol. 224:899-904 (1992) and de Vos, et al., Science 255:306-312 (1992)).

[0682] As those of skill will appreciate, the disclosure includes at least one biologically active protein scaffold of the disclosure. Biologically active protein scaffolds have a specific activity at least 20%, 30%, or 40%, and, preferably, at least 50%, 60%, or 70%, and, most preferably, at least 80%, 90%, or 95%-99% or more of the specific activity of the native (non-synthetic), endogenous or related and known protein scaffold. Methods of assaying and quantifying measures of enzymatic activity and substrate specificity are well known to those of skill in the art.

[0683] In another aspect, the disclosure relates to protein scaffolds and fragments, as described herein, which are modified by the covalent attachment of an organic moiety. Such modification can produce a protein scaffold fragment with improved pharmacokinetic properties (e.g., increased in vivo serum half-life). The organic moiety can be a linear or branched hydrophilic polymeric group, fatty acid group, or fatty acid ester group. In particular aspect, the hydrophilic polymeric group can have a molecular weight of about 800 to about 120,000 Daltons and can be a polyalkane glycol (e.g., polyethylene glycol (PEG), polypropylene glycol (PPG)), carbohydrate polymer, amino acid polymer or polyvinyl pyrolidone, and the fatty acid or fatty acid ester group can comprise from about eight to about forty carbon atoms.

[0684] The modified protein scaffolds and fragments of the disclosure can comprise one or more organic moieties that are covalently bonded, directly or indirectly, to the antibody. Each organic moiety that is bonded to a protein scaffold or fragment of the disclosure can independently be a hydrophilic polymeric group, a fatty acid group or a fatty acid ester group. As used herein, the term “fatty acid” encompasses mono-carboxylic acids and di— carboxylic acids. A “hydrophilic polymeric group,” as the term is used herein, refers to an organic polymer that is more soluble in water than in octane. For example, polylysine is more soluble in water than in octane. Thus, a protein scaffold modified by the covalent attachment of polylysine is encompassed by the disclosure. Hydrophilic polymers suitable for modifying protein scaffolds of the disclosure can be linear or branched and include, for example, polyalkane glycols (e.g., PEG, monomethoxy-polyethylene glycol (mPEG), PPG and the like), carbohydrates (e.g., dextran, cellulose, oligosaccharides, polysaccharides and the like), polymers of hydrophilic amino acids (e.g., polylysine, polyarginine, polyaspartate and the like), polyalkane oxides (e.g., polyethylene oxide, polypropylene oxide and the like) and polyvinyl pyrolidone. Preferably, the hydrophilic polymer that modifies the protein scaffold of the disclosure has a molecular weight of about 800 to about 150,000 Daltons as a separate molecular entity. For example, PEG5000 and PEG20,000, wherein the subscript is the average molecular weight of the polymer in Daltons, can be used. The hydrophilic polymeric group can be substituted with one to about six alkyl, fatty acid or fatty acid ester groups. Hydrophilic polymers that are substituted with a fatty acid or fatty acid ester group can be prepared by employing suitable methods. For example, a polymer comprising an amine group can be coupled to a carboxylate of the fatty acid or fatty acid ester, and an activated carboxylate (e.g., activated with N,N-carbonyl diimidazole) on a fatty acid or fatty acid ester can be coupled to a hydroxyl group on a polymer.

[0685] Fatty acids and fatty acid esters suitable for modifying protein scaffolds of the disclosure can be saturated or can contain one or more units of unsaturation. Fatty acids that are suitable for modifying protein scaffolds of the disclosure include, for example, n-dodecanoate (C12, laurate), n-tetradecanoate (C14, myristate), n-octadecanoate (C18, stearate), n-eicosanoate (C20, arachidate), n-docosanoate (C22, behenate), n-triacontanoate (C30), n-tetracontanoate (C40), cis-Δ9-octadecanoate (C18, oleate), all cis-Δ5,8,11,14-eicosatetraenoate (C20, arachidonate), octanedioic acid, tetradecanedioic acid, octadecanedioic acid, docosanedioic acid, and the like. Suitable fatty acid esters include mono-esters of dicarboxylic acids that comprise a linear or branched lower alkyl group. The lower alkyl group can comprise from one to about twelve, preferably, one to about six, carbon atoms.

[0686] The modified protein scaffolds and fragments can be prepared using suitable methods, such as by reaction with one or more modifying agents. A “modifying agent” as the term is used herein, refers to a suitable organic group (e.g., hydrophilic polymer, a fatty acid, a fatty acid ester) that comprises an activating group. An “activating group” is a chemical moiety or functional group that can, under appropriate conditions, react with a second chemical group thereby forming a covalent bond between the modifying agent and the second chemical group. For example, amine-reactive activating groups include electrophilic groups, such as tosylate, mesylate, halo (chloro, bromo, fluoro, iodo), N-hydroxysuccinimidyl esters (NHS), and the like. Activating groups that can react with thiols include, for example, maleimide, iodoacetyl, acrylolyl, pyridyl disulfides, 5-thiol-2-nitrobenzoic acid thiol (TNB-thiol), and the like. An aldehyde functional group can be coupled to amine- or hydrazide-containing molecules, and an azide group can react with a trivalent phosphorous group to form phosphoramidate or phosphorimide linkages. Suitable methods to introduce activating groups into molecules are known in the art (see for example, Hermanson, G. T., Bioconjugate Techniques, Academic Press: San Diego, Calif. (1996)). An activating group can be bonded directly to the organic group (e.g., hydrophilic polymer, fatty acid, fatty acid ester), or through a linker moiety, for example, a divalent C1-C12 group wherein one or more carbon atoms can be replaced by a heteroatom, such as oxygen, nitrogen or sulfur. Suitable linker moieties include, for example, tetraethylene glycol, —(CH₂)₃—, —NH—(CH₂)₆—NH—, —(CH₂)₂—NH— and —CH2—O—CH₂—CH₂—O—CH₂—CH₂—O—CH—NH—. Modifying agents that comprise a linker moiety can be produced, for example, by reacting a mono-Boc-alkyldiamine (e.g., mono-Boc-ethylenediamine, mono-Boc-diaminohexane) with a fatty acid in the presence of 1-ethyl-3-(3-dimethylaminopropyl) carbodiimide (EDC) to form an amide bond between the free amine and the fatty acid carboxylate. The Boc protecting group can be removed from the product by treatment with trifluoroacetic acid (TFA) to expose a primary amine that can be coupled to another carboxylate, as described, or can be reacted with maleic anhydride and the resulting product cyclized to produce an activated maleimide derivative of the fatty acid. (See, for example, Thompson, et al., WO 92/16221, the entire teachings of which are incorporated herein by reference.)

[0687] The modified protein scaffolds of the disclosure can be produced by reacting a protein scaffold or fragment with a modifying agent. For example, the organic moieties can be bonded to the protein scaffold in a non-site specific manner by employing an amine-reactive modifying agent, for example, an NHS ester of PEG. Modified protein scaffolds and fragments comprising an organic moiety that is bonded to specific sites of a protein scaffold of the disclosure can be prepared using suitable methods, such as reverse proteolysis (Fisch et al., Bioconjugate Chem., 3:147-153 (1992); Werlen et al., Bioconjugate Chem., 5:411-417 (1994); Kumaran et al., Protein Sci. 6(10):2233-2241 (1997); Itoh et al., Bioorg. Chem., 24(1): 59-68 (1996); Capellas et al., Biotechnol. Bioeng., 56(4):456-463 (1997)), and the methods described in Hermanson, G. T., Bioconjugate Techniques, Academic Press: San Diego, Calif. (1996).

### Definitions

[0688] As used throughout the disclosure, the singular forms “a,” “and,” and “the” include plural referents unless the context clearly dictates otherwise. Thus, for example, reference to “a method” includes a plurality of such methods and reference to “a dose” includes reference to one or more doses and equivalents thereof known to those skilled in the art, and so forth.

[0689] The term “about” or “approximately” means within an acceptable error range for the particular value as determined by one of ordinary skill in the art, which will depend in part on how the value is measured or determined, e.g., the limitations of the measurement system. For example, “about” can mean within 1 or more standard deviations. Alternatively, “about” can mean a range of up to 20%, or up to 10%, or up to 5%, or up to 1% of a given value. Alternatively, particularly with respect to biological systems or processes, the term can mean within an order of magnitude, preferably within 5-fold, and more preferably within 2-fold, of a value. Where particular values are described in the application and claims, unless otherwise stated the term “about” meaning within an acceptable error range for the particular value should be assumed.

[0690] The disclosure provides isolated or substantially purified polynucleotide or protein compositions. An “isolated” or “purified” polynucleotide or protein, or biologically active portion thereof, is substantially or essentially free from components that normally accompany or interact with the polynucleotide or protein as found in its naturally occurring environment. Thus, an isolated or purified polynucleotide or protein is substantially free of other cellular material or culture medium when produced by recombinant techniques, or substantially free of chemical precursors or other chemicals when chemically synthesized. Optimally, an “isolated” polynucleotide is free of sequences (optimally protein encoding sequences) that naturally flank the polynucleotide (i.e., sequences located at the 5′ and 3′ ends of the polynucleotide) in the genomic DNA of the organism from which the polynucleotide is derived. For example, in various aspects, the isolated polynucleotide can contain less than about 5 kb, 4 kb, 3 kb, 2 kb, 1 kb, 0.5 kb, or 0.1 kb of nucleotide sequence that naturally flank the polynucleotide in genomic DNA of the cell from which the polynucleotide is derived. A protein that is substantially free of cellular material includes preparations of protein having less than about 30%, 20%, 10%, 5%, or 1% (by dry weight) of contaminating protein. When the protein of the disclosure or biologically active portion thereof is recombinantly produced, optimally culture medium represents less than about 30%, 20%, 10%, 5%, or 1% (by dry weight) of chemical precursors or non-protein-of-interest chemicals.

[0691] The disclosure provides fragments and variants of the disclosed DNA sequences and proteins encoded by these DNA sequences. As used throughout the disclosure, the term “fragment” refers to a portion of the DNA sequence or a portion of the amino acid sequence and hence protein encoded thereby. Fragments of a DNA sequence comprising coding sequences may encode protein fragments that retain biological activity of the native protein and hence DNA recognition or binding activity to a target DNA sequence as herein described. Alternatively, fragments of a DNA sequence that are useful as hybridization probes generally do not encode proteins that retain biological activity or do not retain promoter activity. Thus, fragments of a DNA sequence may range from at least about 20 nucleotides, about 50 nucleotides, about 100 nucleotides, and up to the full-length polynucleotide of the disclosure.

[0692] Nucleic acids or proteins of the disclosure can be constructed by a modular approach including preassembling monomer units and/or repeat units in target vectors that can subsequently be assembled into a final destination vector. Polypeptides of the disclosure may comprise repeat monomers of the disclosure and can be constructed by a modular approach by preassembling repeat units in target vectors that can subsequently be assembled into a final destination vector. The disclosure provides polypeptide produced by this method as well nucleic acid sequences encoding these polypeptides. The disclosure provides host organisms and cells comprising nucleic acid sequences encoding polypeptides produced this modular approach.

[0693] The term “antibody” is used in the broadest sense and specifically covers single monoclonal antibodies (including agonist and antagonist antibodies) and antibody compositions with polyepitopic specificity. It is also within the scope hereof to use natural or synthetic analogs, mutants, variants, alleles, homologs and orthologs (herein collectively referred to as “analogs”) of the antibodies hereof as defined herein. Thus, according to an aspect hereof, the term “antibody hereof” in its broadest sense also covers such analogs. Generally, in such analogs, one or more amino acid residues may have been replaced, deleted and/or added, compared to the antibodies hereof as defined herein.

[0694] “Antibody fragment”, and all grammatical variants thereof, as used herein are defined as a portion of an intact antibody comprising the antigen binding site or variable region of the intact antibody, wherein the portion is free of the constant heavy chain domains (i.e. CH2, CH3, and CH4, depending on antibody isotype) of the Fc region of the intact antibody. Examples of antibody fragments include Fab, Fab′, Fab′—SH, F(ab′)₂, and Fv fragments; diabodies; any antibody fragment that is a polypeptide having a primary structure consisting of one uninterrupted sequence of contiguous amino acid residues (referred to herein as a “single-chain antibody fragment” or “single chain polypeptide”), including without limitation (1) single-chain Fv (scFv) molecules (2) single chain polypeptides containing only one light chain variable domain, or a fragment thereof that contains the three CDRs of the light chain variable domain, without an associated heavy chain moiety and (3) single chain polypeptides containing only one heavy chain variable region, or a fragment thereof containing the three CDRs of the heavy chain variable region, without an associated light chain moiety; and multispecific or multivalent structures formed from antibody fragments. In an antibody fragment comprising one or more heavy chains, the heavy chain(s) can contain any constant domain sequence (e.g., CHI in the IgG isotype) found in a non-Fc region of an intact antibody, and/or can contain any hinge region sequence found in an intact antibody, and/or can contain a leucine zipper sequence fused to or situated in the hinge region sequence or the constant domain sequence of the heavy chain(s). The term further includes single domain antibodies (“sdAB”) which generally refers to an antibody fragment having a single monomeric variable antibody domain, (for example, from camelids). Such antibody fragment types will be readily understood by a person having ordinary skill in the art.

[0695] “Binding” refers to a sequence-specific, non-covalent interaction between macromolecules (e.g., between a protein and a nucleic acid). Not all components of a binding interaction need be sequence-specific (e.g., contacts with phosphate residues in a DNA backbone), as long as the interaction as a whole is sequence-specific.

[0696] The term “comprising” is intended to mean that the compositions and methods include the recited elements, but do not exclude others. “Consisting essentially of” when used to define compositions and methods, shall mean excluding other elements of any essential significance to the combination when used for the intended purpose. Thus, a composition consisting essentially of the elements as defined herein would not exclude trace contaminants or inert carriers. “Consisting of” shall mean excluding more than trace elements of other ingredients and substantial method steps. Aspects defined by each of these transition terms are within the scope of this disclosure.

[0697] The term “epitope” refers to an antigenic determinant of a polypeptide. An epitope could comprise three amino acids in a spatial conformation, which is unique to the epitope. Generally, an epitope consists of at least 4, 5, 6, or 7 such amino acids, and more usually, consists of at least 8, 9, or 10 such amino acids. Methods of determining the spatial conformation of amino acids are known in the art, and include, for example, x-ray crystallography and two-dimensional nuclear magnetic resonance.

[0698] As used herein, “expression” refers to the process by which polynucleotides are transcribed into mRNA and/or the process by which the transcribed mRNA is subsequently being translated into peptides, polypeptides, or proteins. If the polynucleotide is derived from genomic DNA, expression may include splicing of the mRNA in a eukaryotic cell.

[0699] “Gene expression” refers to the conversion of the information, contained in a gene, into a gene product. A gene product can be the direct transcriptional product of a gene (e.g., mRNA, tRNA, rRNA, antisense RNA, ribozyme, shRNA, micro RNA, structural RNA or any other type of RNA) or a protein produced by translation of an mRNA. Gene products also include RNAs which are modified, by processes such as capping, polyadenylation, methylation, and editing, and proteins modified by, for example, methylation, acetylation, phosphorylation, ubiquitination, ADP-ribosylation, myristylation, and glycosylation.

[0700] “Modulation” or “regulation” of gene expression refers to a change in the activity of a gene. Modulation of expression can include, but is not limited to, gene activation and gene repression.

[0701] The term “operatively linked” or its equivalents (e.g., “linked operatively”) means two or more molecules are positioned with respect to each other such that they are capable of interacting to affect a function attributable to one or both molecules or a combination thereof.

[0702] Non-covalently linked components and methods of making and using non-covalently linked components, are disclosed. The various components may take a variety of different forms as described herein. For example, non-covalently linked (i.e., operatively linked) proteins may be used to allow temporary interactions that avoid one or more problems in the art. The ability of non-covalently linked components, such as proteins, to associate and dissociate enables a functional association only or primarily under circumstances where such association is needed for the desired activity. The linkage may be of duration sufficient to allow the desired effect.

[0703] A method for directing proteins to a specific locus in a genome of an organism is disclosed. The method may comprise the steps of providing a DNA localization component and providing an effector molecule, wherein the DNA localization component and the effector molecule are capable of operatively linking via a non-covalent linkage.

[0704] The term “scFv” refers to a single-chain variable fragment. scFv is a fusion protein of the variable regions of the heavy (VH) and light chains (VL) of immunoglobulins, connected with a linker peptide. The linker peptide may be from about 5 to 40 amino acids or from about 10 to 30 amino acids or about 5, 10, 15, 20, 25, 30, 35, or 40 amino acids in length. Single-chain variable fragments lack the constant Fc region found in complete antibody molecules, and, thus, the common binding sites (e.g., Protein G) used to purify antibodies. The term further includes a scFv that is an intrabody, an antibody that is stable in the cytoplasm of the cell, and which may bind to an intracellular protein.

[0705] The term “single domain antibody” means an antibody fragment having a single monomeric variable antibody domain which is able to bind selectively to a specific antigen. A single-domain antibody generally is a peptide chain of about 110 amino acids long, comprising one variable domain (VH) of a heavy-chain antibody, or of a common IgG, which generally have similar affinity to antigens as whole antibodies, but are more heat-resistant and stable towards detergents and high concentrations of urea. Examples are those derived from camelid or fish antibodies. Alternatively, single-domain antibodies can be made from common murine or human IgG with four chains.

[0706] The terms “specifically bind” and “specific binding” as used herein refer to the ability of an antibody, an antibody fragment or a nanobody to preferentially bind to a particular antigen that is present in a homogeneous mixture of different antigens. In some aspects, a specific binding interaction will discriminate between desirable and undesirable antigens in a sample. In some aspects, more than about ten- to 100-fold or more (e.g., more than about 1000- or 10,000-fold). “Specificity” refers to the ability of an immunoglobulin or an immunoglobulin fragment, such as a nanobody, to bind preferentially to one antigenic target versus a different antigenic target and does not necessarily imply high affinity.

[0707] A “target site” or “target sequence” is a nucleic acid sequence that defines a portion of a nucleic acid to which a binding molecule will bind, provided sufficient conditions for binding exist.

[0708] The terms “nucleic acid” or “oligonucleotide” or “polynucleotide” refer to at least two nucleotides covalently linked together. The depiction of a single strand also defines the sequence of the complementary strand. Thus, a nucleic acid may also encompass the complementary strand of a depicted single strand. A nucleic acid of the disclosure also encompasses substantially identical nucleic acids and complements thereof that retain the same structure or encode for the same protein.

[0709] Probes of the disclosure may comprise a single stranded nucleic acid that can hybridize to a target sequence under stringent hybridization conditions. Thus, nucleic acids of the disclosure may refer to a probe that hybridizes under stringent hybridization conditions.

[0710] Nucleic acids of the disclosure may be single- or double-stranded. Nucleic acids of the disclosure may contain double-stranded sequences even when the majority of the molecule is single-stranded. Nucleic acids of the disclosure may contain single-stranded sequences even when the majority of the molecule is double-stranded. Nucleic acids of the disclosure may include genomic DNA, cDNA, RNA, or a hybrid thereof. Nucleic acids of the disclosure may contain combinations of deoxyribo- and ribo-nucleotides. Nucleic acids of the disclosure may contain combinations of bases including uracil, adenine, thymine, cytosine, guanine, inosine, xanthine hypoxanthine, isocytosine and isoguanine. Nucleic acids of the disclosure may be synthesized to comprise non-natural amino acid modifications. Nucleic acids of the disclosure may be obtained by chemical synthesis methods or by recombinant methods.

[0711] Nucleic acids of the disclosure, either their entire sequence, or any portion thereof, may be non-naturally occurring. Nucleic acids of the disclosure may contain one or more mutations, substitutions, deletions, or insertions that do not naturally-occur, rendering the entire nucleic acid sequence non-naturally occurring. Nucleic acids of the disclosure may contain one or more duplicated, inverted or repeated sequences, the resultant sequence of which does not naturally-occur, rendering the entire nucleic acid sequence non-naturally occurring. Nucleic acids of the disclosure may contain modified, artificial, or synthetic nucleotides that do not naturally-occur, rendering the entire nucleic acid sequence non-naturally occurring.

[0712] Given the redundancy in the genetic code, a plurality of nucleotide sequences may encode any particular protein. All such nucleotides sequences are contemplated herein.

[0713] As used throughout the disclosure, the term “operably linked” refers to the expression of a gene that is under the control of a promoter with which it is spatially connected. A promoter can be positioned 5′ (upstream) or 3′ (downstream) of a gene under its control. The distance between a promoter and a gene can be approximately the same as the distance between that promoter and the gene it controls in the gene from which the promoter is derived. Variation in the distance between a promoter and a gene can be accommodated without loss of promoter function.

[0714] As used throughout the disclosure, the term “promoter” refers to a synthetic or naturally-derived molecule which is capable of conferring, activating or enhancing expression of a nucleic acid in a cell. A promoter can comprise one or more specific transcriptional regulatory sequences to further enhance expression and/or to alter the spatial expression and/or temporal expression of same. A promoter can also comprise distal enhancer or repressor elements, which can be located as much as several thousand base pairs from the start site of transcription. A promoter can be derived from sources including viral, bacterial, fungal, plants, insects, and animals. A promoter can regulate the expression of a gene component constitutively or differentially with respect to cell, the tissue or organ in which expression occurs or, with respect to the developmental stage at which expression occurs, or in response to external stimuli such as physiological stresses, pathogens, metal ions, or inducing agents. Representative examples of promoters include the bacteriophage T7 promoter, bacteriophage T3 promoter, SP6 promoter, lac operator-promoter, tac promoter, SV40 late promoter, SV40 early promoter, RSV-LTR promoter, CMV IE promoter, EF-1 Alpha promoter, CAG promoter, SV40 early promoter or SV40 late promoter and the CMV IE promoter.

[0715] As used throughout the disclosure, the term “substantially complementary” refers to a first sequence that is at least 60%, 65%, 70%, 75%, 80%, 85%, 90%, 95%, 97%, 98% or 99% identical to the complement of a second sequence over a region of 8, 9, 10, 11, 12, 13, 14, 15, 16, 17, 18, 19, 20, 21, 22, 23, 24, 25, 30, 35, 40, 45, 50, 55, 60, 65, 70, 75, 80, 85, 90, 95, 100, 180, 270, 360, 450, 540, or more nucleotides or amino acids, or that the two sequences hybridize under stringent hybridization conditions.

[0716] As used throughout the disclosure, the term “substantially identical” refers to a first and second sequence are at least 60%, 65%, 70%, 75%, 80%, 85%, 90%, 95%, 97%, 98% or 99% identical over a region of 8, 9, 10, 11, 12, 13, 14, 15, 16, 17, 18, 19, 20, 21, 22, 23, 24, 25, 30, 35, 40, 45, 50, 55, 60, 65, 70, 75, 80, 85, 90, 95, 100, 180, 270, 360, 450, 540 or more nucleotides or amino acids, or with respect to nucleic acids, if the first sequence is substantially complementary to the complement of the second sequence.

[0717] As used throughout the disclosure, the term “variant” when used to describe a nucleic acid, refers to (i) a portion or fragment of a referenced nucleotide sequence; (ii) the complement of a referenced nucleotide sequence or portion thereof; (iii) a nucleic acid that is substantially identical to a referenced nucleic acid or the complement thereof; or (iv) a nucleic acid that hybridizes under stringent conditions to the referenced nucleic acid, complement thereof, or a sequences substantially identical thereto.

[0718] As used throughout the disclosure, the term “vector” refers to a nucleic acid sequence containing an origin of replication. A vector can be a viral vector, bacteriophage, bacterial artificial chromosome or yeast artificial chromosome. A vector can be a DNA or RNA vector. A vector can be a self-replicating extrachromosomal vector, and preferably, is a DNA plasmid. A vector may comprise a combination of an amino acid with a DNA sequence, an RNA sequence, or both a DNA and an RNA sequence.

[0719] As used throughout the disclosure, the term “variant” when used to describe a peptide or polypeptide, refers to a peptide or polypeptide that differs in amino acid sequence by the insertion, deletion, or conservative substitution of amino acids, but retain at least one biological activity. Variant can also mean a protein with an amino acid sequence that is substantially identical to a referenced protein with an amino acid sequence that retains at least one biological activity.

[0720] A conservative substitution of an amino acid, i.e., replacing an amino acid with a different amino acid of similar properties (e.g., hydrophilicity, degree and distribution of charged regions) is recognized in the art as typically involving a minor change. These minor changes can be identified, in part, by considering the hydropathic index of amino acids, as understood in the art. Kyte et al., J. Mol. Biol. 157: 105-132 (1982). The hydropathic index of an amino acid is based on a consideration of its hydrophobicity and charge. Amino acids of similar hydropathic indexes can be substituted and still retain protein function. In an aspect, amino acids having hydropathic indexes of ±2 are substituted. The hydrophilicity of amino acids can also be used to reveal substitutions that would result in proteins retaining biological function. A consideration of the hydrophilicity of amino acids in the context of a peptide permits calculation of the greatest local average hydrophilicity of that peptide, a useful measure that has been reported to correlate well with antigenicity and immunogenicity. U.S. Pat. No. 4,554,101, incorporated fully herein by reference.

[0721] Substitution of amino acids having similar hydrophilicity values can result in peptides retaining biological activity, for example immunogenicity. Substitutions can be performed with amino acids having hydrophilicity values within ±2 of each other. Both the hydrophobicity index and the hydrophilicity value of amino acids are influenced by the particular side chain of that amino acid. Consistent with that observation, amino acid substitutions that are compatible with biological function are understood to depend on the relative similarity of the amino acids, and particularly the side chains of those amino acids, as revealed by the hydrophobicity, hydrophilicity, charge, size, and other properties.

[0722] As used herein, “conservative” amino acid substitutions may be defined as set out in Tables A, B, or C below. In some aspects, fusion polypeptides and/or nucleic acids encoding such fusion polypeptides include conservative substitutions have been introduced by modification of polynucleotides encoding polypeptides of the disclosure. Amino acids can be classified according to physical properties and contribution to secondary and tertiary protein structure. A conservative substitution is a substitution of one amino acid for another amino acid that has similar properties. Exemplary conservative substitutions are set out in Table A.

TABLE A
Conservative Substitutions I

| Side chain characteristics | | Amino Acid |
|---|---|---|
| Aliphatic | Non-polar | G A P I L V F |
| | Polar-uncharged | C S T M N Q |
| | Polar-charged | D E K R |

| | |
|---|---|
| Aromatic | H F W Y |
| Other | N Q D E |

[0723] Alternately, conservative amino acids can be grouped as described in Lehninger, (Biochemistry, Second Edition; Worth Publishers, Inc. NY, N.Y. (1975), pp. 71-77) as set forth in Table B.

TABLE B
Conservative Substitutions II

| Side Chain Characteristic | | Amino Acid |
|---|---|---|
| Non-polar (hydrophobic) | Aliphatic: | A L I V P |
| | Aromatic: | F W Y |
| | Sulfur-containing: | M |
| | Borderline: | G Y |
| Uncharged-polar | Hydroxyl: | S T Y |
| | Amides: | N Q |
| | Sulfhydryl: | C |
| | Borderline: | G Y |

| | |
|---|---|
| Positively Charged (Basic): | K R H |
| Negatively Charged (Acidic): | D E |

[0724] Alternately, exemplary conservative substitutions are set out in Table C.

TABLE C
Conservative Substitutions III

| Original Residue | Exemplary Substitution |
|---|---|
| Ala (A) | Val Leu Ile Met |
| Arg (R) | Lys His |
| Asn (N) | Gln |
| Asp (D) | Glu |
| Cys (C) | Ser Thr |
| Gln (Q) | Asn |
| Glu (E) | Asp |
| Gly (G) | Ala Val Leu Pro |
| His (H) | Lys Arg |
| Ile (I) | Leu Val Met Ala Phe |
| Leu (L) | Ile Val Met Ala Phe |
| Lys (K) | Arg His |
| Met (M) | Leu Ile Val Ala |
| Phe (F) | Trp Tyr Ile |
| Pro (P) | Gly Ala Val Leu Ile |
| Ser (S) | Thr |
| Thr (T) | Ser |
| Trp (W) | Tyr Phe Ile |
| Tyr (Y) | Trp Phe Thr Ser |
| Val (V) | Ile Leu Met Ala |

[0725] It should be understood that the polypeptides of the disclosure are intended to include polypeptides bearing one or more insertions, deletions, or substitutions, or any combination thereof, of amino acid residues as well as modifications other than insertions, deletions, or substitutions of amino acid residues. Polypeptides or nucleic acids of the disclosure may contain one or more conservative substitution.

[0726] As used throughout the disclosure, the term “more than one” of the aforementioned amino acid substitutions refers to 2, 3, 4, 5, 6, 7, 8, 9, 10, 11, 12, 13, 14, 15, 16, 17, 18, 19, or 20 or more of the recited amino acid substitutions. The term “more than one” may refer to 2, 3, 4, or 5 of the recited amino acid substitutions.

[0727] Polypeptides and proteins of the disclosure, either their entire sequence, or any portion thereof, may be non-naturally occurring. Polypeptides and proteins of the disclosure may contain one or more mutations, substitutions, deletions, or insertions that do not naturally-occur, rendering the entire amino acid sequence non-naturally occurring. Polypeptides and proteins of the disclosure may contain one or more duplicated, inverted or repeated sequences, the resultant sequence of which does not naturally-occur, rendering the entire amino acid sequence non-naturally occurring. Polypeptides and proteins of the disclosure may contain modified, artificial, or synthetic amino acids that do not naturally-occur, rendering the entire amino acid sequence non-naturally occurring.

[0728] As used throughout the disclosure, “sequence identity” may be determined by using the stand-alone executable BLAST engine program for blasting two sequences (b12seq), which can be retrieved from the National Center for Biotechnology Information (NCBI) ftp site, using the default parameters (Tatusova and Madden, FEMS Microbiol Lett., 1999, 174, 247-250; which is incorporated herein by reference in its entirety). The terms “identical” or “identity” when used in the context of two or more nucleic acids or polypeptide sequences, refer to a specified percentage of residues that are the same over a specified region of each of the sequences. The percentage can be calculated by optimally aligning the two sequences, comparing the two sequences over the specified region, determining the number of positions at which the identical residue occurs in both sequences to yield the number of matched positions, dividing the number of matched positions by the total number of positions in the specified region, and multiplying the result by 100 to yield the percentage of sequence identity. In cases where the two sequences are of different lengths or the alignment produces one or more staggered ends and the specified region of comparison includes only a single sequence, the residues of single sequence are included in the denominator but not the numerator of the calculation. When comparing DNA and RNA, thymine (T) and uracil (U) can be considered equivalent. Identity can be performed manually or by using a computer sequence algorithm such as BLAST or BLAST 2.0.

[0729] As used throughout the disclosure, the term “endogenous” refers to nucleic acid or protein sequence naturally associated with a target gene or a host cell into which it is introduced.

[0730] As used throughout the disclosure, the term “exogenous” refers to nucleic acid or protein sequence not naturally associated with a target gene or a host cell into which it is introduced, including non-naturally occurring multiple copies of a naturally occurring nucleic acid, e.g., DNA sequence, or naturally occurring nucleic acid sequence located in a non-naturally occurring genome location.

[0731] The disclosure provides methods of introducing a polynucleotide construct comprising a DNA sequence into a host cell. By “introducing” is intended presenting to the cell the polynucleotide construct in such a manner that the construct gains access to the interior of the host cell. The methods of the disclosure do not depend on a particular method for introducing a polynucleotide construct into a host cell, only that the polynucleotide construct gains access to the interior of one cell of the host. Methods for introducing polynucleotide constructs into bacteria, plants, fungi and animals are known in the art including, but not limited to, stable transformation methods, transient transformation methods, and virus-mediated methods.

### EXAMPLES

### Example 1. Expression of CSRs on K562 Cells

[0732] Materials and Methods

[0733] K562 cells were thawed into RPMI with 10% FBS and culture at 37° C. In preparation for electroporation, K562 cells were centrifuged and resuspended in appropriate buffer (Lonza). Cells were electroporated with CSR encoded by an mRNA using Lonza Nucleofector. The reaction was supplemented with RPMI+10% FBS medum and cells were rested overnight at 32° C. 24 hrs after electroporation, flow cytometry was used to assess expression of CSR via CD2 expression with anti CD2 primary antibody (R&D Systems) and FITC secondary antibody (Jackson Immuno Research).

[0734] Results

[0735] K562 cells do not express endogenous CD2. Expression of the CSRs was checked 24 hours post delivery via flow cytometry using a CD2 polyclonal antibody. Expression of all CSRs of the disclosure (CD2z.V2; 2DH.TF2z; 2DH.2TF2z; 82DH.TF2z; 82DH.2TF2z) was successfully detected on K562 cells, relative to a mock control (cells were electroporated with no mRNA). Table 1 summarizes mean fluorescence intensity (MFI) of CD2 expression in K562 cells that received CSR mRNA.

TABLE 1
Expression of CSRs on K562 cells

| Condition | Mean CD2 Expression in K562s (MFI) ± SEM |
|---|---|
| Mock | 832 ± 289.6 |
| CD2z.V2 (control) | 4192 ± 521.5 |
| 2DH.TF2z | 5455 ± 386.5 |
| 2DH.2TF2z | 6475 ± 1474 |
| 82DH.TF2z | 5154 |
| 82DH.2TF2z | 5624 ± 784.5 |

### Example 2. Expression and Functional Characterization of CSRs on Pan-T Cells

[0736] Materials and Methods

[0737] Pan-T cells were isolated by CD4/CD8 positive selection (CliniMACS) from healthy donor apheresis material (OBI or StemExpress). Frozen Pan T cells were thawed into Immunocult medium (StemCell Technologies) and rested overnight at 37° C. In preparation for electroporation, T cells were centrifuged and resuspended in appropriate buffer (Lonza). Cells were electroporated with CSR mRNA using Lonza Nucleofector. The reaction was supplemented with Immunocult medium and cultured overnight at 32° C. 24 hrs post electroporation, flow cytometry was used to assess expression of CSR via CD2 expression using an anti CD2 primary antibody (R&D Systems) and FITC secondary antibody (Jackson Immuno Research). Cells were transferred to 37° C. and cells were activated with Immunocult Human CD2 T cell activator (StemCell Technologies). 4 and 24 hours after activation, flow cytometry was used to assess expression of CSR signaling using anti-pSTAT5-AF647 antibody (BD).

[0738] Results

[0739] Expression of the CSRs was checked 24 hours post delivery via flow cytometry using a CD2 polyclonal antibody. Both frequency and MFI of CD2 expression was greater than mock control (cells were electroporated with no mRNA) for all CSRs tested (CD2z.V2; 2DH.TF2z; 2DH.2TF2z; 82DH.TF2z; 82DH.2TF2z). Table 2 shows the frequency and MFI of CD2 expression in pan T cells in two different donors.

TABLE 2
Expression of CSRs on Pan-T cells.

| | Mean Frequency of | | | |
|---|---|---|---|---|
| | CD2 Expression | | Mean CD2 Expression | |
| | (% of live cells) ± SEM | | (MFI) ± SEM | |
| Condition | Donor 1 | Donor 2 | Donor 1 | Donor 2 |
| Mock | 1.99 ± 0.46 | 2.25 ± 0.07 | 3463 ± 5.00 | 2909 ± 4.50 |
| CD2z.V2 | 24.20 ± 0.70 | 13.75 ± 3.05 | 5356 ± 33.00 | 4459 ± 288.00 |
| (control) | | | | |
| 2DH.TF2z | 3.355 ± 0.45 | 2.35 ± 0.10 | 3946 ± 24.00 | 3121 ± 4.50 |
| 2DH.2TF2z | 6.56 ± 0.89 | 5.29 ± 0.44 | 4443 ± 48.00 | 3637 ± 17.00 |
| 82DH.TF2z | 2.815 ± 0.51 | 2.73 | 3810 ± 76.5 | 3213 |
| 82DH.2TF2z | 7.00 ± 0.46 | 5.56 ± 0.94 | 4365 ± 168.5 | 3615 ± 50 |

### Example 3. Expression and Functional Characterization of CSRs on Treg Cells

[0740] Materials and Methods

[0741] Treg cells were isolated from healthy donor apheresis material (OBI, StemExpress, or StemCell Technologies) using Easy Sep Human CD4+CD127^{low}CD25+ Regulatory T cell Isolation kit (StemCell Technologies) following kit protocol. Purity of isolated Treg cells was confirmed by flow cytometry. Isolated Treg cells were cultured in X-VIVO 15 medium (Lonza) supplemented with 5% human AB serum (Lonza). In preparation for electroporation, Tregs were centrifuged and resuspended in appropriate buffer (Lonza). Cells were electroporated with CSR mRNA using Lonza Nucleofector. The reaction was supplemented with medium and rested overnight at 32° C. 24 hrs after electroporation, flow cytometry was used to assess expression of CSR via CD2 expression with anti CD2 primary antibody (R&D Systems) and FITC secondary antibody (Jackson Immuno Research). Cells were transferred to 37° C. and activated with Immunocult Human CD2 T cell activator (StemCell Technologies). 16 and 24 hours after activation, flow cytometry was used to assess the expression of CSR signaling using anti-pSTAT5-AF647 antibody (BD).

[0742] To track cellular expansion and viability, Treg cells were cultured in X-VIVO 15 medium (Lonza) supplemented with 5% human AB serum (Lonza) and 500U/mL IL-2 (Peprotech) and activated with Immunocult Human CD3/CD28/CD2 T cell activator (StemCell Technologies), cell counts were performed on days 0, 1, 5, 7, 9, 11, and 14 post electroporation using Luna Automated cell counter. Medium is supplemented at day 5, 7, and 9. Medium was exchanged on day 11. A schematic of the protocol is shown in FIG. 4.

[0743] Results

[0744] CSRs were delivered to pan T cells from two donors by electroporation. 24 hours later pan T cells were activated with Immunocult CD2 activator. Expression of pSTAT5, a readout of downstream CSR signaling, was tested via flow cytometry at baseline, 4 hours and 24 hours post activation of the cells with CD2 activator. Table 3 shows the time course of pSTAT5 expression triggered by anti-CD2 activation, in pan T cells that express the CSR, in two donors.

TABLE 3
pSTAT5 expression in Pan-Tcells expressing CSRs

| | Time course of pSTAT5 Expression post | | | | | |
|---|---|---|---|---|---|---|
| | activation in pan T cells (% of live cells) | | | | | |
| | Baseline | | +4 hours | | +24 hours | |
| Condition | Donor 1 | Donor 2 | Donor 1 | Donor 2 | Donor 1 | Donor 2 |
| Mock | 1.34 | 5.77 | 1.58 | 6.6 | 2.36 | 4.54 |
| CD2z.V2 | 2.09 | 29.4 | 3.52 | 41.1 | 17.7 | 47.9 |
| (control) | | | | | | |
| 2DH.TF2z | 3.27 | 2.85 | 5.43 | 4.2 | 5.67 | 5.17 |
| 2DH.2TF2z | 3.94 | 2.35 | 4.73 | 2.78 | 8.34 | 15.8 |
| 82DH.TF2z | 3.9 | 7.64 | 5.49 | 5.09 | 6.16 | 10.1 |
| 82DH.2TF2z | 2.03 | 6.84 | 3.24 | 11 | 5.5 | 6.36 |

[0745] Treg cells (CD4+CD25+CD127−) were purified using a StemCell Technologies Isolation kit. CSR mRNA was delivered by electroporation. Expression of the CSRs was interrogated 24 hours post-delivery by flow cytometry using a CD2 polyclonal antibody. Both frequency and MFI of CD2 expression was greater than mock control (cells were electroporated with no mRNA) for all CSRs tested (CD2z.V2; 2DH.TF2z; 2DH.2TF2z; 82DH.TF2z; 82DH.2TF2z). Table 4 shows the frequency and MFI of CD2 expression in Treg cells in two different donors.

TABLE 4
CSR expression in Treg Cells from two donors.

| | Frequency of CD2 Expression | | CD2 Expression | |
|---|---|---|---|---|
| | (% of live cells) | | (MFI) | |
| Condition | Donor 3 | Donor 4 | Donor 3 | Donor 4 |
| Mock | 0.28 | 1.15 | 536 | 4711 |
| CD2z.V2 | 12 | 14.4 | 1852 | 8016 |
| (control) | | | | |
| 2DH.TF2z | 3.24 | 7.5 | 1656 | 6953 |
| 2DH.2TF2z | 12.8 | 19.1 | 2318 | 11166 |
| 82DH.TF2z | 7.43 | 9.63 | 2180 | 8983 |
| 82DH.2TF2z | 25.5 | 16 | 3205 | 9510 |

[0746] CSRs were delivered to Treg cells from two donors by electroporation. 24 hours later, Treg cells were activated with Immunocult CD2-activator. Expression of pSTAT5, a readout of CSR signaling, was tested via flow cytometry at baseline, 16 hours and 24 hours after activation of the cells with CD2-activator. Table 5 shows the time course of pSTAT5 expression in pan T cells delivered CSRs after CD2 activation in two donors. 2DH.2TF2z shows the highest pSTAT5 activation in Treg cells.

TABLE 5
pSTAT5 expression in Treg cells from two donors

| | Time course of pSTAT5 Expression post | | | | | |
|---|---|---|---|---|---|---|
| | activation in Treg cells (% of live cells) | | | | | |
| | Baseline | | +16 hours | | +24 hours | |
| Condition | Donor 4 | Donor 5 | Donor 4 | Donor 5 | Donor 4 | Donor 5 |
| Mock | 1.3 | 0.87 | 3.6 | 1.92 | 5.3 | 2.72 |
| CD2z.V2 | 2.95 | 0.58 | 7.1 | 10.3 | 10.5 | 11.1 |
| (control) | | | | | | |
| 2DH.TF2z | 2.04 | — | 9.24 | — | 8.64 | — |
| 2DH.2TF2z | 5.775 | 5.29 | 13.86 | 10.3 | 15.75 | 13.5 |
| 82DH.TF2z | 4.05 | — | 10.5 | — | 11.55 | — |
| 82DH.2TF2z | 5.5425 | 6.94 | 13.32 | 7.45 | 13.635 | 9.16 |

[0747] Fold expansion and viability of Treg cells were assessed. A Treg cellular expansion of greater than 10% is evidence of successful expansion. For Donor 3, fold expansion and % cell viability was assessed on days 0, 5, 7, 11 and 14. On day 14, Treg cells expressing CSRs (CD2z.V2; 2DH.TF2z; 2DH.2TF2z; 82DH.TF2z; 82DH.2TF2z) resulted in at least 8-fold to 23-fold expansion. The viability of cells were comparable to the mock control (cells electroporated with no mRNA). For Donor 6, fold expansion and % cell viability was assessed on days 0, 1, 3, 9, 11 and 14. On day 14, Treg cells expressing CSRs (CD2z.V2; 2DH.TF2z; 2DH.2TF2z; 82DH.TF2z; 82DH.2TF2z) resulted in at least 13-fold to 16-fold expansion. The viability of cells were comparable to the mock control (cells electroporated with no mRNA).

### Example 4. Expression of CSR on T Cells Enhances Ex Vivo Expansion of Regulatory T Cells and Effector T Cells

[0748] The CSRs delivering TNFR2 signals (FIG. 1) are designed to specifically promote expansion of Treg or Treg-like cells, alone or in combination with one or more of the other CSR constructs listed herein encoding the IL2RB or IL2RG intracellular signaling domains that are designed to deliver IL-2 signals (FIGS. 2 and 3).

[0749] Pan T cells, CD4+ or CD8+ T cells, isolated from normal donor blood were genetically modified to express one or more of the CSRs described herein, either with or without additional modification using the piggyBac® (PB) DNA modification system, as well as possible further editing using the Cas-CLOVER™ gene-editing system. Cells were electroporated in a single reaction with one or more CSRs, possibly also a transposon encoding a selection gene and an mRNA encoding the super piggyBac™ transposase enzyme, and possibly an mRNA encoding Cas-CLOVER™ with the appropriate guide RNA (gRNA) for site-specific gene editing. If a PB transposon was delivered, it may encode one or more of the following: a promoter, a CAR, an inducible proapoptotic polypeptide, a selection gene, FoxP3, and/or an activation-induced gene expression system. If Cas-CLOVER was delivered to cells, it may have been co-delivered with gRNA targeting genes associated with immune rejection like any of those that comprise the TCR, like TCRα, TCRβ or CD3, and/or a structural component of HLA, such as β2-microglobulin. The cells were subsequently stimulated, once or more, with agonist mAbs anti-CD2, anti-CD3 and/or anti-CD28, and were later selected for genetic modification over the course of an ex vivo culture period. Ex vivo culture may or may not be supplemented with exogenous cytokines such as IL-2. At the end of the initial culture period, T cells were phenotypically characterized by flow cytometry, indicating successful engineering. The relative expansion is determined by comparing the expression of cell surface markers on engineered cells with matched cells that are not engineered, thereby indicating Treg or Teff expansion.

[0750] Tregs will be detected using the following markers: CD4+CD25+CD127^{low} or CD4+CD25+ FoxP3+ or CD4+CD25+ FoxP3+CD127^{low}. Optionally, CD45RA surface expression may be used to characterize naïve Tregs. The function of Tregs will be assessed by testing their ability to suppress T effector cells in vitro and/or testing their ability to secrete cytokines such as TGF beta and IL-10 when stimulated using ELISA-like or FACS assays.

[0751] Teffs will be detected using the following markers: CD3+CD4+ or CD3+CD8+. A typical effector T cell also is CD62L−, CCR7−, CD45RA+ and CD45RO−. Effector T cell function can be assessed by a variety of standard methods. For example, the production of IFN gamma upon stimulation can be measured by ELISA assay or by flow cytometry. Stimulation may include TCR stimulation or CD3 bead stimulation.

### Example 5. Effects of CSR on JAK1/3, STAT5 and AKT Phosphorylation in Modified Regulatory T Cells and Effector T Cells

[0752] The CSRs delivering TNFR2 signals (FIG. 1) are designed to specifically promote expansion of Treg or Treg-like cells, in combination with one or more of the other CSR constructs listed herein encoding the IL2RB or IL2RG intracellular signaling domains that are designed to deliver IL−2 signals (FIGS. 2 and 3). A combination of one or more of the CSR constructs listed herein encoding the IL2RB or IL2RG intracellular signaling domains that are designed to deliver IL−2 signals can be used to specifically promote expansion of effector or effector-like T cells.

[0753] Treg cells that have a CD4+, CD25+, FOXP3+ and/or CSR+ expression profile were isolated and assessed for the phosphorylation of downstream signaling protein by western blot or FACS following stimulation of the CSR or other Treg-specific receptor. CSRs with TNFR2 intracellular domains were assessed for AKT and STAT5 activation. CSRs with IL2RB and IL2RG intracellular domains were assessed for JAK1/3 and STAT5 activation. Phosphorylation of these proteins indicates successful downstream signaling of the CSR. For example, protocols for determining JAK1/3 phosphorylation are described in Cheng et. al. Mol Cell Biol. 2008 April; 28(7): 2271-2282. Effector T cells that have a CD3+CD4+ or CD3+CD8+ and/or CSR+ expression profile were isolated and assessed for the phosphorylation of downstream signaling protein by western blot or FACS following stimulation of the CSR or other effector T cell receptor. CSRs with IL2RB and IL2RG intracellular domains were assess for JAK1/3 and STATS activation.

### Example 6. Therapeutic Function of CSR Modified Regulatory T Cells and Effector

[0754] T cells

[0755] An in vitro method to assess the therapeutic function of the CSR modified Tregs is to determine the ability of the stimulated Treg to produce suppressive cytokines, such as TGF beta and/or IL−10. Another method to assess therapeutic function is to determine the ability of stimulated Tregs to suppress effector T cell function in a co-culture assay.

[0756] An in vitro methods to assess the therapeutic function a CSR modified effector T cell is to determine the ability of stimulated effector T cell to product inflammatory cytokines, such as IFN gamma, IL−2, TNF alpha. Another method to assess therapeutic function of the effector T cell is to determine the ability of stimulated effector T cells to kill a specific target cell.

[0757] For in vivo assessment of therapeutic efficacy, standard animal models can be used for either Tregs or effector T cells. For example, exemplary models to assess therapeutic Tregs in vivo, include: 1) Tregs to prevent allo transplant rejection, tested in mice (Noyan et. al. Am J Transplant. 2017 April; 17(4):917-930. doi: 10.1111/ajt.14175); 2) Tregs to prevent allo transplant rejection, tested in mice (MacDonald et. al. J Clin Invest. 2016 Apr 1; 126(4): 1413-1424); 3) Tregs tested in a murine model of rheumatoid arthritis (Sun et. al. Inflammation. 2018 March;41(2):485-495); 4) Tregs tested in a murine model of Crohn's disease (Clough et. al Gut. 2020 Jan 24. pii: gutjn1-2019-319850); and 5) Tregs tested in a murine model of multiple sclerosis (Keeler et. al. Mol Ther. 2018 Jan 3;26(1):173-183). There are many exemplary models to assess therapeutic effector T cells in vivo, some of which are reviewed (Stromnes et. A1. Immunol Rev. 2014 January; 257(1): 145-164).

### Other Embodiments

[0758] While particular embodiments of the disclosure have been illustrated and described, various other changes and modifications can be made without departing from the spirit and scope of the disclosure. The scope of the appended claims includes all such changes and modifications that are within the scope of this disclosure.

What is claimed is:

1. A non-naturally occurring chimeric stimulatory receptor (CSR) comprising:
(a) an ectodomain comprising a activation component, wherein the activation component is isolated or derived from a first protein;
(b) a transmembrane domain; and
(c) at least one intracellular domain, wherein the intracellular domain is isolated or derived from a second protein; and
wherein the second protein is Tumor Necrosis Factor Receptor 2 (TNFR2).

2. The CSR of claim 1, wherein the activation component comprises an Interleukin-2 Receptor subunit Beta (IL2RB) extracellular domain, an Interleukin-2 Receptor subunit Gamma (IL2RG) extracellular domain or a CD2 extracellular domain.

3. The CSR of claim 1, wherein the activation component comprises a modification.

4. The CSR of claim 3, wherein the modification comprises a mutation or a truncation of the amino acid sequence of the activation component of the first protein when compared to a wild type sequence of the activation component of the first protein.

5. The CSR of claim 4, wherein the mutation or a truncation of the amino acid sequence of the activation component comprises a mutation or truncation of a CD2 extracellular domain or a portion thereof to which an agonist binds.

6. The CSR of claim 5, wherein the CSR comprising a mutation or truncation of a CD2 extracellular domain or a portion thereof to which an agonist binds does not bind CD58.

7. The CSR of claim 5, wherein the CD2 extracellular domain comprising the mutation or truncation comprises an amino acid sequence of SEQ ID NO: 4.

8. The CSR of claim 1, wherein the intracellular domain further a CD3 protein.

9. The CSR of claim 1, wherein the TNFR2 intracellular domain comprises the amino acid sequence of SEQ ID NO: 6.

10. The CSR of claim 8, wherein the CD3λ intracellular domain comprises the amino acid sequence of SEQ ID NO: 5.

11. The CSR of claim 1, wherein the ectodomain further comprises a signal peptide.

12. The CSR of claim 11, wherein the signal peptide is derived from a third protein.

13. The CSR of claim 12, wherein the first protein and the third protein are identical.

14. The CSR of claim 11, wherein the signal peptide comprises a CD2 signal peptide, an IL2RB signal peptide, an IL2RG signal peptide or a CD8 signal peptide.

15. The CSR of claim 14, wherein the CD2 signal peptide comprises an amino acid sequence of SEQ ID NO: 9.

16. The CSR of claim 14, wherein the CD8 signal peptide comprises an amino acid sequence of SEQ ID NO: 12.

17. The CSR of claim 1, wherein the transmembrane domain is isolated or derived from a fourth protein.

18. The CSR of claim 17, wherein the first protein and the fourth protein are identical.

19. The CSR of claim 17, wherein the transmembrane domain comprises a TNFR2 transmembrane domain, CD2 transmembrane domain, an IL2RB transmembrane domain or an IL2RG transmembrane domain.

20. The CSR of claim 19, wherein the TNFR2 transmembrane domain comprises an amino acid sequence of SEQ ID NO: 13.

21. The CSR of claim 19, wherein the CD2 transmembrane domain comprises an amino acid sequence of SEQ ID NO: 14.

22. The CSR of claim 1 comprising an amino acid sequence at least 95% identical to any one of SEQ ID NO: 17, 18, 37 or 38.

23. The CSR of claim 1 comprising an amino acid sequence at least 99% identical to any one of SEQ ID NO: 17, 18, 37 or 38.

24. The CSR of claim 1 comprising an amino acid sequence of any one of SEQ ID NO:
17, 18, 37 or 38.

25. A non-naturally occurring chimeric stimulatory receptor (CSR) comprising:
(a) an ectodomain comprising a signal peptide and an activation component, wherein the signal peptide comprises a CD2 signal peptide or a portion thereof or comprises a CD8 signal peptide or a portion thereof; and
wherein the activation component comprises a CD2 extracellular domain or a portion thereof and wherein the CD2 extracellular domain or a portion thereof comprises a mutation or truncation when compared to a wild type sequence of CD2;
(b) a transmembrane domain, wherein the transmembrane domain comprises a TNFR2 transmembrane domain or a portion thereof or comprises a CD2 transmembrane domain or portion thereof; and
(c) an intracellular domain, wherein the intracellular domain comprises a TNFR2 intracellular domain or a portion thereof and a CD3ζ protein or a portion thereof.

26. A nucleic acid sequence encoding the CSR of any one of claims 1-25.

27. A cell comprising the CSR of any one of claims 1-25.

28. A cell comprising the nucleic acid of claim 26.

29. The cell of claim 27 or 28, wherein the cell is an allogeneic cell.

30. The cell of claim 27 or 28, wherein the cell is an autologous cell.

31. The cell of claim 29 or 30, wherein the cell is a T-lymphocyte (T cell).

32. The cell of claim 31, wherein the T cell is a regulatory T cell.

33. The modified T cell of claim 61, wherein the CSR is transiently expressed in the modified T cell.

34. The modified T cell of claim 61, wherein the CSR is stably expressed in the modified T cell.

35. A composition comprising a population of modified T cells, wherein a plurality of the modified T cells of the population comprise the CSR according to any one of claims 1-25.

36. The composition according claim 35 for use in the treatment of a disease or disorder.

37. A method of treating a disease or disorder comprising administering to a subject in need thereof a therapeutically-effective amount of the composition according to claim 35.

38. A method of producing a population of modified T cells comprising introducing into a plurality of primary human T cells a composition comprising the CSR of claims 1-25 or a sequence encoding the same to produce a plurality of modified T cells under conditions that stably express the CSR within the plurality of modified T cells.

39. A method of producing a population of modified T cells comprising introducing into a plurality of primary human T cells a composition comprising the CSR of claims 1-25 or a sequence encoding the same to produce a plurality of modified T cells under conditions that transiently express the CSR within the plurality of modified T cells.

40. A method of expanding modified Treg cells within the population of modified T cells produced by the method of claim 38 or 39 comprising culturing the modified T cells with an activator composition under conditions to expand a plurality of activated modified Treg cells, wherein expansion of the plurality of modified Treg cells is at least 5% higher than the expansion of a plurality of Treg cells not stably expressing the CSR under the same conditions.

41. The method of claim 40, wherein the expansion of the plurality of modified T cells is at least 10% higher than the expansion of a plurality of wild-type T cells not stably expressing the CSR under the same conditions.

42. A composition comprising a population of modified T cells expanded by the method of claim 40 or 41.

43. The composition of claim 42 for use in the treatment of a disease or disorder.

The application's sequence listing, which the Patent Office published only in electronic form, follows.

SEQUENCE LISTING (258 sequences)

SEQ ID NO: 1 - protein, 185 aa, Artificial Sequence
  CD2 ECD
KEITNALETWGALGQDINLDIPSFQMSDDIDDIKWEKTSDKKKIAQFRKEKETFKEKDTYKLFKNGTLKIKHLKTDDQDIYKVSIYDTKGKNVLEKIFDLKIQERVSKPKISWTCINTTLTCEVMNGTDPELNLYQDGKHLKLSQRVITHKWTTSLSAKFKCTAGNKVSKESSVEPVSCPEKGLD

SEQ ID NO: 2 - protein, 214 aa, Artificial Sequence
  IL2RB ECD
AVNGTSQFTCFYNSRANISCVWSQDGALQDTSCQVHAWPDRRRWNQTCELLPVSQASWACNLILGAPDSQKLTTVDIVTLRVLCREGVRWRVMAIQDFKPFENLRLMAPISLQVVHVETHRCNISWEISQASHYFERHLEFEARTLSPGHTWEEAPLLTLKQKQEWICLETLTPDTQYEFQVRVKPLQGEFTTWSPWSQPLAFRTKPAALGKDT

SEQ ID NO: 3 - protein, 239 aa, Artificial Sequence
  IL2RG ECD
LNTTILTPNGNEDTTADFFLTTMPTDSLSVSTLPLPEVQCFVFNVEYMNCTWNSSSEPQPTNLTLHYWYKNSDNDKVQKCSHYLFSEEITSGCQLQKKEIHLYQTFVVQLQDPREPRRQATQMLKLQNLVIPWAPENLTLHKLSESQLELNWNNRFLNHCLEHLVQYRTDWDHSWTEQSVDYRHKFSLPSVDGQKRYTFRVRSRFNPLCGSAQHWSEWSHPIHWGSNTSKENPFLFALE

SEQ ID NO: 4 - protein, 184 aa, Artificial Sequence
  mutated or truncated CD2 ECD
KEITNALETWGALGQDINLDIPSFQMSDDIDDIKWEKTSDKKKIAQFRKEKETFKEKDTYKLFKNGTLKIKHLKTDDQDIYKVSIYHTKGKNVLEKIFDLKIQERVSKPKISWTCINTTLTCEVMNGTDPELNLYQDGKHLKLSQRVITHKWTTSLSAKFKCTAGNKVSKESSVEPVSCPEKGL

SEQ ID NO: 5 - protein, 112 aa, Artificial Sequence
  CD3z
RVKFSRSADAPAYKQGQNQLYNELNLGRREEYDVLDKRRGRDPEMGGKPRRKNPQEGLYNELQKDKMAEAYSEIGMKGERRRGKGHDGLYQGLSTATKDTYDALHMQALPPR

SEQ ID NO: 6 - protein, 174 aa, Homo Sapiens
KKKPLCLQREAKVPHLPADKARGTQGPEQQHLLITAPSSSSSSLESSASALDRRAPTRNQPQAPGVEASGAGEARASTGSSDSSPGGHGTQVNVTCIVNVCSSSDHSSQCSSQASSTMGDTDSSPSESPKDEQVPFSKEECAFRSQLETPETLLGSTEEKPLPLGVPDAGMKPS

SEQ ID NO: 7 - protein, 286 aa, Homo sapiens
NCRNTGPWLKKVLKCNTPDPSKFFSQLSSEHGGDVQKWLSSPFPSSSFSPGGLAPEISPLEVLERDKVTQLLLQQDKVPEPASLSSNHSLTSCFTNQGYFFFHLPDALEIEACQVYFTYDPYSEEDPDEGVAGAPTGSSPQPLQPLSGEDDAYCTFPSRDDLLLFSPSLLGGPSPPSTAPGGSGAGEERMPPSLQERVPRDWDPQPLGPPTPGVPDLVDFQPPPELVLREAGEEVPDAGPREGVSFPWSRPPGQGEFRALNARLPLNTDAYLSLQELQGQDPTHLV

SEQ ID NO: 8 - protein, 86 aa, Homo sapiens
ERTMPRIPTLKNLEDLVTEYHGNFSAWSGVSKGLAESLQPDYSERLCLVSEIPPKGGALGEGPGASPCNQHSPYWAPPCYTLKPET

SEQ ID NO: 9 - protein, 24 aa, Homo sapiens
MSFPCKFVASFLLIFNVSSKGAVS

SEQ ID NO: 10 - protein, 26 aa, Homo sapiens
MAAPALSWRLPLLILLLPLATSWASA

SEQ ID NO: 11 - protein, 22 aa, Homo sapiens
MLKPSLPFTSLLFLQLPLLGVG

SEQ ID NO: 12 - protein, 21 aa, Homo Sapiens
MALPVTALLLPLALLLHAARP

SEQ ID NO: 13 - protein, 30 aa, Homo sapiens
FALPVGLIVGVTALGLLIIGVVNCVIMTQV

SEQ ID NO: 14 - protein, 26 aa, Homo sapiens
IYLIIGICGGGSLLMVFVALLVFYIT

SEQ ID NO: 15 - protein, 25 aa, Homo sapiens
IPWLGHLLVGLSGAFGFIILVYLLI

SEQ ID NO: 16 - protein, 22 aa, Homo sapiens
AVVISVGSMGLIISLLCVYFWL

SEQ ID NO: 17 - protein, 525 aa, Artificial Sequence
  CSR 2DH.TF2z
MSFPCKFVASFLLIFNVSSKGAVSKEITNALETWGALGQDINLDIPSFQMSDDIDDIKWEKTSDKKKIAQFRKEKETFKEKDTYKLFKNGTLKIKHLKTDDQDIYKVSIYHTKGKNVLEKIFDLKIQERVSKPKISWTCINTTLTCEVMNGTDPELNLYQDGKHLKLSQRVITHKWTTSLSAKFKCTAGNKVSKESSVEPVSCPEKGLDFALPVGLIVGVTALGLLIIGVVNCVIMTQVKKKPLCLQREAKVPHLPADKARGTQGPEQQHLLITAPSSSSSSLESSASALDRRAPTRNQPQAPGVEASGAGEARASTGSSDSSPGGHGTQVNVTCIVNVCSSSDHSSQCSSQASSTMGDTDSSPSESPKDEQVPFSKEECAFRSQLETPETLLGSTEEKPLPLGVPDAGMKPSRVKFSRSADAPAYKQGQNQLYNELNLGRREEYDVLDKRRGRDPEMGGKPRRKNPQEGLYNELQKDKMAEAYSEIGMKGERRRGKGHDGLYQGLSTATKDTYDALHMQALPPR

SEQ ID NO: 18 - protein, 521 aa, Artificial Sequence
  CSR 2DH.2TF2z
MSFPCKFVASFLLIFNVSSKGAVSKEITNALETWGALGQDINLDIPSFQMSDDIDDIKWEKTSDKKKIAQFRKEKETFKEKDTYKLFKNGTLKIKHLKTDDQDIYKVSIYHTKGKNVLEKIFDLKIQERVSKPKISWTCINTTLTCEVMNGTDPELNLYQDGKHLKLSQRVITHKWTTSLSAKFKCTAGNKVSKESSVEPVSCPEKGLDIYLIIGICGGGSLLMVFVALLVFYITKKKPLCLQREAKVPHLPADKARGTQGPEQQHLLITAPSSSSSSLESSASALDRRAPTRNQPQAPGVEASGAGEARASTGSSDSSPGGHGTQVNVTCIVNVCSSSDHSSQCSSQASSTMGDTDSSPSESPKDEQVPFSKEECAFRSQLETPETLLGSTEEKPLPLGVPDAGMKPSRVKFSRSADAPAYKQGQNQLYNELNLGRREEYDVLDKRRGRDPEMGGKPRRKNPQEGLYNELQKDKMAEAYSEIGMKGERRRGKGHDGLYQGLSTATKDTYDALHMQALPPR

SEQ ID NO: 19 - protein, 663 aa, Artificial Sequence
  CSR BBBz
MAAPALSWRLPLLILLLPLATSWASAAVNGTSQFTCFYNSRANISCVWSQDGALQDTSCQVHAWPDRRRWNQTCELLPVSQASWACNLILGAPDSQKLTTVDIVTLRVLCREGVRWRVMAIQDFKPFENLRLMAPISLQVVHVETHRCNISWEISQASHYFERHLEFEARTLSPGHTWEEAPLLTLKQKQEWICLETLTPDTQYEFQVRVKPLQGEFTTWSPWSQPLAFRTKPAALGKDTIPWLGHLLVGLSGAFGFIILVYLLINCRNTGPWLKKVLKCNTPDPSKFFSQLSSEHGGDVQKWLSSPFPSSSFSPGGLAPEISPLEVLERDKVTQLLLQQDKVPEPASLSSNHSLTSCFTNQGYFFFHLPDALEIEACQVYFTYDPYSEEDPDEGVAGAPTGSSPQPLQPLSGEDDAYCTFPSRDDLLLFSPSLLGGPSPPSTAPGGSGAGEERMPPSLQERVPRDWDPQPLGPPTPGVPDLVDFQPPPELVLREAGEEVPDAGPREGVSFPWSRPPGQGEFRALNARLPLNTDAYLSLQELQGQDPTHLVRVKFSRSADAPAYKQGQNQLYNELNLGRREEYDVLDKRRGRDPEMGGKPRRKNPQEGLYNELQKDKMAEAYSEIGMKGERRRGKGHDGLYQGLSTATKDTYDALHMQALPPR

SEQ ID NO: 20 - protein, 520 aa, Artificial Sequence
  CSR 2BB
MSFPCKFVASFLLIFNVSSKGAVSKEITNALETWGALGQDINLDIPSFQMSDDIDDIKWEKTSDKKKIAQFRKEKETFKEKDTYKLFKNGTLKIKHLKTDDQDIYKVSIYHTKGKNVLEKIFDLKIQERVSKPKISWTCINTTLTCEVMNGTDPELNLYQDGKHLKLSQRVITHKWTTSLSAKFKCTAGNKVSKESSVEPVSCPEKGLDIPWLGHLLVGLSGAFGFIILVYLLINCRNTGPWLKKVLKCNTPDPSKFFSQLSSEHGGDVQKWLSSPFPSSSFSPGGLAPEISPLEVLERDKVTQLLLQQDKVPEPASLSSNHSLTSCFTNQGYFFFHLPDALEIEACQVYFTYDPYSEEDPDEGVAGAPTGSSPQPLQPLSGEDDAYCTFPSRDDLLLFSPSLLGGPSPPSTAPGGSGAGEERMPPSLQERVPRDWDPQPLGPPTPGVPDLVDFQPPPELVLREAGEEVPDAGPREGVSFPWSRPPGQGEFRALNARLPLNTDAYLSLQELQGQDPTHLV

SEQ ID NO: 21 - protein, 632 aa, Artificial Sequence
  CSR 2BBz
MSFPCKFVASFLLIFNVSSKGAVSKEITNALETWGALGQDINLDIPSFQMSDDIDDIKWEKTSDKKKIAQFRKEKETFKEKDTYKLFKNGTLKIKHLKTDDQDIYKVSIYHTKGKNVLEKIFDLKIQERVSKPKISWTCINTTLTCEVMNGTDPELNLYQDGKHLKLSQRVITHKWTTSLSAKFKCTAGNKVSKESSVEPVSCPEKGLDIPWLGHLLVGLSGAFGFIILVYLLINCRNTGPWLKKVLKCNTPDPSKFFSQLSSEHGGDVQKWLSSPFPSSSFSPGGLAPEISPLEVLERDKVTQLLLQQDKVPEPASLSSNHSLTSCFTNQGYFFFHLPDALEIEACQVYFTYDPYSEEDPDEGVAGAPTGSSPQPLQPLSGEDDAYCTFPSRDDLLLFSPSLLGGPSPPSTAPGGSGAGEERMPPSLQERVPRDWDPQPLGPPTPGVPDLVDFQPPPELVLREAGEEVPDAGPREGVSFPWSRPPGQGEFRALNARLPLNTDAYLSLQELQGQDPTHLVRVKFSRSADAPAYKQGQNQLYNELNLGRREEYDVLDKRRGRDPEMGGKPRRKNPQEGLYNELQKDKMAEAYSEIGMKGERRRGKGHDGLYQGLSTATKDTYDALHMQALPPR

SEQ ID NO: 22 - protein, 521 aa, Artificial Sequence
  CSR 22B
MSFPCKFVASFLLIFNVSSKGAVSKEITNALETWGALGQDINLDIPSFQMSDDIDDIKWEKTSDKKKIAQFRKEKETFKEKDTYKLFKNGTLKIKHLKTDDQDIYKVSIYHTKGKNVLEKIFDLKIQERVSKPKISWTCINTTLTCEVMNGTDPELNLYQDGKHLKLSQRVITHKWTTSLSAKFKCTAGNKVSKESSVEPVSCPEKGLDIYLIIGICGGGSLLMVFVALLVFYITNCRNTGPWLKKVLKCNTPDPSKFFSQLSSEHGGDVQKWLSSPFPSSSFSPGGLAPEISPLEVLERDKVTQLLLQQDKVPEPASLSSNHSLTSCFTNQGYFFFHLPDALEIEACQVYFTYDPYSEEDPDEGVAGAPTGSSPQPLQPLSGEDDAYCTFPSRDDLLLFSPSLLGGPSPPSTAPGGSGAGEERMPPSLQERVPRDWDPQPLGPPTPGVPDLVDFQPPPELVLREAGEEVPDAGPREGVSFPWSRPPGQGEFRALNARLPLNTDAYLSLQELQGQDPTHLV

SEQ ID NO: 23 - protein, 633 aa, Artificial Sequence
  CSR 22Bz
MSFPCKFVASFLLIFNVSSKGAVSKEITNALETWGALGQDINLDIPSFQMSDDIDDIKWEKTSDKKKIAQFRKEKETFKEKDTYKLFKNGTLKIKHLKTDDQDIYKVSIYHTKGKNVLEKIFDLKIQERVSKPKISWTCINTTLTCEVMNGTDPELNLYQDGKHLKLSQRVITHKWTTSLSAKFKCTAGNKVSKESSVEPVSCPEKGLDIYLIIGICGGGSLLMVFVALLVFYITNCRNTGPWLKKVLKCNTPDPSKFFSQLSSEHGGDVQKWLSSPFPSSSFSPGGLAPEISPLEVLERDKVTQLLLQQDKVPEPASLSSNHSLTSCFTNQGYFFFHLPDALEIEACQVYFTYDPYSEEDPDEGVAGAPTGSSPQPLQPLSGEDDAYCTFPSRDDLLLFSPSLLGGPSPPSTAPGGSGAGEERMPPSLQERVPRDWDPQPLGPPTPGVPDLVDFQPPPELVLREAGEEVPDAGPREGVSFPWSRPPGQGEFRALNARLPLNTDAYLSLQELQGQDPTHLVRVKFSRSADAPAYKQGQNQLYNELNLGRREEYDVLDKRRGRDPEMGGKPRRKNPQEGLYNELQKDKMAEAYSEIGMKGERRRGKGHDGLYQGLSTATKDTYDALHMQALPPR

SEQ ID NO: 24 - protein, 481 aa, Artificial Sequence
  CSR GGGz
MLKPSLPFTSLLFLQLPLLGVGLNTTILTPNGNEDTTADFFLTTMPTDSLSVSTLPLPEVQCFVFNVEYMNCTWNSSSEPQPTNLTLHYWYKNSDNDKVQKCSHYLFSEEITSGCQLQKKEIHLYQTFVVQLQDPREPRRQATQMLKLQNLVIPWAPENLTLHKLSESQLELNWNNRFLNHCLEHLVQYRTDWDHSWTEQSVDYRHKFSLPSVDGQKRYTFRVRSRFNPLCGSAQHWSEWSHPIHWGSNTSKENPFLFALEAVVISVGSMGLIISLLCVYFWLERTMPRIPTLKNLEDLVTEYHGNFSAWSGVSKGLAESLQPDYSERLCLVSEIPPKGGALGEGPGASPCNQHSPYWAPPCYTLKPETRVKFSRSADAPAYKQGQNQLYNELNLGRREEYDVLDKRRGRDPEMGGKPRRKNPQEGLYNELQKDKMAEAYSEIGMKGERRRGKGHDGLYQGLSTATKDTYDALHMQALPPR

SEQ ID NO: 25 - protein, 317 aa, Artificial Sequence
  CSR 2GG
MSFPCKFVASFLLIFNVSSKGAVSKEITNALETWGALGQDINLDIPSFQMSDDIDDIKWEKTSDKKKIAQFRKEKETFKEKDTYKLFKNGTLKIKHLKTDDQDIYKVSIYHTKGKNVLEKIFDLKIQERVSKPKISWTCINTTLTCEVMNGTDPELNLYQDGKHLKLSQRVITHKWTTSLSAKFKCTAGNKVSKESSVEPVSCPEKGLDAVVISVGSMGLIISLLCVYFWLERTMPRIPTLKNLEDLVTEYHGNFSAWSGVSKGLAESLQPDYSERLCLVSEIPPKGGALGEGPGASPCNQHSPYWAPPCYTLKPET

SEQ ID NO: 26 - protein, 429 aa, Artificial Sequence
  CSR 2GGz
MSFPCKFVASFLLIFNVSSKGAVSKEITNALETWGALGQDINLDIPSFQMSDDIDDIKWEKTSDKKKIAQFRKEKETFKEKDTYKLFKNGTLKIKHLKTDDQDIYKVSIYHTKGKNVLEKIFDLKIQERVSKPKISWTCINTTLTCEVMNGTDPELNLYQDGKHLKLSQRVITHKWTTSLSAKFKCTAGNKVSKESSVEPVSCPEKGLDAVVISVGSMGLIISLLCVYFWLERTMPRIPTLKNLEDLVTEYHGNFSAWSGVSKGLAESLQPDYSERLCLVSEIPPKGGALGEGPGASPCNQHSPYWAPPCYTLKPETRVKFSRSADAPAYKQGQNQLYNELNLGRREEYDVLDKRRGRDPEMGGKPRRKNPQEGLYNELQKDKMAEAYSEIGMKGERRRGKGHDGLYQGLSTATKDTYDALHMQALPPR

SEQ ID NO: 27 - protein, 321 aa, Artificial Sequence
  CSR 22G
MSFPCKFVASFLLIFNVSSKGAVSKEITNALETWGALGQDINLDIPSFQMSDDIDDIKWEKTSDKKKIAQFRKEKETFKEKDTYKLFKNGTLKIKHLKTDDQDIYKVSIYHTKGKNVLEKIFDLKIQERVSKPKISWTCINTTLTCEVMNGTDPELNLYQDGKHLKLSQRVITHKWTTSLSAKFKCTAGNKVSKESSVEPVSCPEKGLDIYLIIGICGGGSLLMVFVALLVFYITERTMPRIPTLKNLEDLVTEYHGNFSAWSGVSKGLAESLQPDYSERLCLVSEIPPKGGALGEGPGASPCNQHSPYWAPPCYTLKPET

SEQ ID NO: 28 - protein, 433 aa, Artificial Sequence
  CSR 22Gz
MSFPCKFVASFLLIFNVSSKGAVSKEITNALETWGALGQDINLDIPSFQMSDDIDDIKWEKTSDKKKIAQFRKEKETFKEKDTYKLFKNGTLKIKHLKTDDQDIYKVSIYHTKGKNVLEKIFDLKIQERVSKPKISWTCINTTLTCEVMNGTDPELNLYQDGKHLKLSQRVITHKWTTSLSAKFKCTAGNKVSKESSVEPVSCPEKGLDIYLIIGICGGGSLLMVFVALLVFYITERTMPRIPTLKNLEDLVTEYHGNFSAWSGVSKGLAESLQPDYSERLCLVSEIPPKGGALGEGPGASPCNQHSPYWAPPCYTLKPETRVKFSRSADAPAYKQGQNQLYNELNLGRREEYDVLDKRRGRDPEMGGKPRRKNPQEGLYNELQKDKMAEAYSEIGMKGERRRGKGHDGLYQGLSTATKDTYDALHMQALPPR

SEQ ID NO: 29 - protein, 606 aa, Artificial Sequence
  CSR 2BBG
MSFPCKFVASFLLIFNVSSKGAVSKEITNALETWGALGQDINLDIPSFQMSDDIDDIKWEKTSDKKKIAQFRKEKETFKEKDTYKLFKNGTLKIKHLKTDDQDIYKVSIYHTKGKNVLEKIFDLKIQERVSKPKISWTCINTTLTCEVMNGTDPELNLYQDGKHLKLSQRVITHKWTTSLSAKFKCTAGNKVSKESSVEPVSCPEKGLDIPWLGHLLVGLSGAFGFIILVYLLINCRNTGPWLKKVLKCNTPDPSKFFSQLSSEHGGDVQKWLSSPFPSSSFSPGGLAPEISPLEVLERDKVTQLLLQQDKVPEPASLSSNHSLTSCFTNQGYFFFHLPDALEIEACQVYFTYDPYSEEDPDEGVAGAPTGSSPQPLQPLSGEDDAYCTFPSRDDLLLFSPSLLGGPSPPSTAPGGSGAGEERMPPSLQERVPRDWDPQPLGPPTPGVPDLVDFQPPPELVLREAGEEVPDAGPREGVSFPWSRPPGQGEFRALNARLPLNTDAYLSLQELQGQDPTHLVERTMPRIPTLKNLEDLVTEYHGNFSAWSGVSKGLAESLQPDYSERLCLVSEIPPKGGALGEGPGASPCNQHSPYWAPPCYTLKPET

SEQ ID NO: 30 - protein, 718 aa, Artificial Sequence
  CSR 2BBGz
MSFPCKFVASFLLIFNVSSKGAVSKEITNALETWGALGQDINLDIPSFQMSDDIDDIKWEKTSDKKKIAQFRKEKETFKEKDTYKLFKNGTLKIKHLKTDDQDIYKVSIYHTKGKNVLEKIFDLKIQERVSKPKISWTCINTTLTCEVMNGTDPELNLYQDGKHLKLSQRVITHKWTTSLSAKFKCTAGNKVSKESSVEPVSCPEKGLDIPWLGHLLVGLSGAFGFIILVYLLINCRNTGPWLKKVLKCNTPDPSKFFSQLSSEHGGDVQKWLSSPFPSSSFSPGGLAPEISPLEVLERDKVTQLLLQQDKVPEPASLSSNHSLTSCFTNQGYFFFHLPDALEIEACQVYFTYDPYSEEDPDEGVAGAPTGSSPQPLQPLSGEDDAYCTFPSRDDLLLFSPSLLGGPSPPSTAPGGSGAGEERMPPSLQERVPRDWDPQPLGPPTPGVPDLVDFQPPPELVLREAGEEVPDAGPREGVSFPWSRPPGQGEFRALNARLPLNTDAYLSLQELQGQDPTHLVERTMPRIPTLKNLEDLVTEYHGNFSAWSGVSKGLAESLQPDYSERLCLVSEIPPKGGALGEGPGASPCNQHSPYWAPPCYTLKPETRVKFSRSADAPAYKQGQNQLYNELNLGRREEYDVLDKRRGRDPEMGGKPRRKNPQEGLYNELQKDKMAEAYSEIGMKGERRRGKGHDGLYQGLSTATKDTYDALHMQALPPR

SEQ ID NO: 31 - protein, 607 aa, Artificial Sequence
  CSR 22BG
MSFPCKFVASFLLIFNVSSKGAVSKEITNALETWGALGQDINLDIPSFQMSDDIDDIKWEKTSDKKKIAQFRKEKETFKEKDTYKLFKNGTLKIKHLKTDDQDIYKVSIYHTKGKNVLEKIFDLKIQERVSKPKISWTCINTTLTCEVMNGTDPELNLYQDGKHLKLSQRVITHKWTTSLSAKFKCTAGNKVSKESSVEPVSCPEKGLDIYLIIGICGGGSLLMVFVALLVFYITNCRNTGPWLKKVLKCNTPDPSKFFSQLSSEHGGDVQKWLSSPFPSSSFSPGGLAPEISPLEVLERDKVTQLLLQQDKVPEPASLSSNHSLTSCFTNQGYFFFHLPDALEIEACQVYFTYDPYSEEDPDEGVAGAPTGSSPQPLQPLSGEDDAYCTFPSRDDLLLFSPSLLGGPSPPSTAPGGSGAGEERMPPSLQERVPRDWDPQPLGPPTPGVPDLVDFQPPPELVLREAGEEVPDAGPREGVSFPWSRPPGQGEFRALNARLPLNTDAYLSLQELQGQDPTHLVERTMPRIPTLKNLEDLVTEYHGNFSAWSGVSKGLAESLQPDYSERLCLVSEIPPKGGALGEGPGASPCNQHSPYWAPPCYTLKPET

SEQ ID NO: 32 - protein, 719 aa, Artificial Sequence
  CSR 22BGz
MSFPCKFVASFLLIFNVSSKGAVSKEITNALETWGALGQDINLDIPSFQMSDDIDDIKWEKTSDKKKIAQFRKEKETFKEKDTYKLFKNGTLKIKHLKTDDQDIYKVSIYHTKGKNVLEKIFDLKIQERVSKPKISWTCINTTLTCEVMNGTDPELNLYQDGKHLKLSQRVITHKWTTSLSAKFKCTAGNKVSKESSVEPVSCPEKGLDIYLIIGICGGGSLLMVFVALLVFYITNCRNTGPWLKKVLKCNTPDPSKFFSQLSSEHGGDVQKWLSSPFPSSSFSPGGLAPEISPLEVLERDKVTQLLLQQDKVPEPASLSSNHSLTSCFTNQGYFFFHLPDALEIEACQVYFTYDPYSEEDPDEGVAGAPTGSSPQPLQPLSGEDDAYCTFPSRDDLLLFSPSLLGGPSPPSTAPGGSGAGEERMPPSLQERVPRDWDPQPLGPPTPGVPDLVDFQPPPELVLREAGEEVPDAGPREGVSFPWSRPPGQGEFRALNARLPLNTDAYLSLQELQGQDPTHLVERTMPRIPTLKNLEDLVTEYHGNFSAWSGVSKGLAESLQPDYSERLCLVSEIPPKGGALGEGPGASPCNQHSPYWAPPCYTLKPETRVKFSRSADAPAYKQGQNQLYNELNLGRREEYDVLDKRRGRDPEMGGKPRRKNPQEGLYNELQKDKMAEAYSEIGMKGERRRGKGHDGLYQGLSTATKDTYDALHMQALPPR

SEQ ID NO: 33 - protein, 603 aa, Artificial Sequence
  CSR 2GGB
MSFPCKFVASFLLIFNVSSKGAVSKEITNALETWGALGQDINLDIPSFQMSDDIDDIKWEKTSDKKKIAQFRKEKETFKEKDTYKLFKNGTLKIKHLKTDDQDIYKVSIYHTKGKNVLEKIFDLKIQERVSKPKISWTCINTTLTCEVMNGTDPELNLYQDGKHLKLSQRVITHKWTTSLSAKFKCTAGNKVSKESSVEPVSCPEKGLDAVVISVGSMGLIISLLCVYFWLERTMPRIPTLKNLEDLVTEYHGNFSAWSGVSKGLAESLQPDYSERLCLVSEIPPKGGALGEGPGASPCNQHSPYWAPPCYTLKPETNCRNTGPWLKKVLKCNTPDPSKFFSQLSSEHGGDVQKWLSSPFPSSSFSPGGLAPEISPLEVLERDKVTQLLLQQDKVPEPASLSSNHSLTSCFTNQGYFFFHLPDALEIEACQVYFTYDPYSEEDPDEGVAGAPTGSSPQPLQPLSGEDDAYCTFPSRDDLLLFSPSLLGGPSPPSTAPGGSGAGEERMPPSLQERVPRDWDPQPLGPPTPGVPDLVDFQPPPELVLREAGEEVPDAGPREGVSFPWSRPPGQGEFRALNARLPLNTDAYLSLQELQGQDPTHLV

SEQ ID NO: 34 - protein, 715 aa, Artificial Sequence
  CSR 2GGBz
MSFPCKFVASFLLIFNVSSKGAVSKEITNALETWGALGQDINLDIPSFQMSDDIDDIKWEKTSDKKKIAQFRKEKETFKEKDTYKLFKNGTLKIKHLKTDDQDIYKVSIYHTKGKNVLEKIFDLKIQERVSKPKISWTCINTTLTCEVMNGTDPELNLYQDGKHLKLSQRVITHKWTTSLSAKFKCTAGNKVSKESSVEPVSCPEKGLDAVVISVGSMGLIISLLCVYFWLERTMPRIPTLKNLEDLVTEYHGNFSAWSGVSKGLAESLQPDYSERLCLVSEIPPKGGALGEGPGASPCNQHSPYWAPPCYTLKPETNCRNTGPWLKKVLKCNTPDPSKFFSQLSSEHGGDVQKWLSSPFPSSSFSPGGLAPEISPLEVLERDKVTQLLLQQDKVPEPASLSSNHSLTSCFTNQGYFFFHLPDALEIEACQVYFTYDPYSEEDPDEGVAGAPTGSSPQPLQPLSGEDDAYCTFPSRDDLLLFSPSLLGGPSPPSTAPGGSGAGEERMPPSLQERVPRDWDPQPLGPPTPGVPDLVDFQPPPELVLREAGEEVPDAGPREGVSFPWSRPPGQGEFRALNARLPLNTDAYLSLQELQGQDPTHLVRVKFSRSADAPAYKQGQNQLYNELNLGRREEYDVLDKRRGRDPEMGGKPRRKNPQEGLYNELQKDKMAEAYSEIGMKGERRRGKGHDGLYQGLSTATKDTYDALHMQALPPR

SEQ ID NO: 35 - protein, 607 aa, Artificial Sequence
  CSR 22GB
MSFPCKFVASFLLIFNVSSKGAVSKEITNALETWGALGQDINLDIPSFQMSDDIDDIKWEKTSDKKKIAQFRKEKETFKEKDTYKLFKNGTLKIKHLKTDDQDIYKVSIYHTKGKNVLEKIFDLKIQERVSKPKISWTCINTTLTCEVMNGTDPELNLYQDGKHLKLSQRVITHKWTTSLSAKFKCTAGNKVSKESSVEPVSCPEKGLDIYLIIGICGGGSLLMVFVALLVFYITERTMPRIPTLKNLEDLVTEYHGNFSAWSGVSKGLAESLQPDYSERLCLVSEIPPKGGALGEGPGASPCNQHSPYWAPPCYTLKPETNCRNTGPWLKKVLKCNTPDPSKFFSQLSSEHGGDVQKWLSSPFPSSSFSPGGLAPEISPLEVLERDKVTQLLLQQDKVPEPASLSSNHSLTSCFTNQGYFFFHLPDALEIEACQVYFTYDPYSEEDPDEGVAGAPTGSSPQPLQPLSGEDDAYCTFPSRDDLLLFSPSLLGGPSPPSTAPGGSGAGEERMPPSLQERVPRDWDPQPLGPPTPGVPDLVDFQPPPELVLREAGEEVPDAGPREGVSFPWSRPPGQGEFRALNARLPLNTDAYLSLQELQGQDPTHLV

SEQ ID NO: 36 - protein, 719 aa, Artificial Sequence
  CSR 22GBz
MSFPCKFVASFLLIFNVSSKGAVSKEITNALETWGALGQDINLDIPSFQMSDDIDDIKWEKTSDKKKIAQFRKEKETFKEKDTYKLFKNGTLKIKHLKTDDQDIYKVSIYHTKGKNVLEKIFDLKIQERVSKPKISWTCINTTLTCEVMNGTDPELNLYQDGKHLKLSQRVITHKWTTSLSAKFKCTAGNKVSKESSVEPVSCPEKGLDIYLIIGICGGGSLLMVFVALLVFYITERTMPRIPTLKNLEDLVTEYHGNFSAWSGVSKGLAESLQPDYSERLCLVSEIPPKGGALGEGPGASPCNQHSPYWAPPCYTLKPETNCRNTGPWLKKVLKCNTPDPSKFFSQLSSEHGGDVQKWLSSPFPSSSFSPGGLAPEISPLEVLERDKVTQLLLQQDKVPEPASLSSNHSLTSCFTNQGYFFFHLPDALEIEACQVYFTYDPYSEEDPDEGVAGAPTGSSPQPLQPLSGEDDAYCTFPSRDDLLLFSPSLLGGPSPPSTAPGGSGAGEERMPPSLQERVPRDWDPQPLGPPTPGVPDLVDFQPPPELVLREAGEEVPDAGPREGVSFPWSRPPGQGEFRALNARLPLNTDAYLSLQELQGQDPTHLVRVKFSRSADAPAYKQGQNQLYNELNLGRREEYDVLDKRRGRDPEMGGKPRRKNPQEGLYNELQKDKMAEAYSEIGMKGERRRGKGHDGLYQGLSTATKDTYDALHMQALPPR

SEQ ID NO: 37 - protein, 522 aa, Artificial Sequence
  CSR 82DH.TF2z
MALPVTALLLPLALLLHAARPKEITNALETWGALGQDINLDIPSFQMSDDIDDIKWEKTSDKKKIAQFRKEKETFKEKDTYKLFKNGTLKIKHLKTDDQDIYKVSIYHTKGKNVLEKIFDLKIQERVSKPKISWTCINTTLTCEVMNGTDPELNLYQDGKHLKLSQRVITHKWTTSLSAKFKCTAGNKVSKESSVEPVSCPEKGLDFALPVGLIVGVTALGLLIIGVVNCVIMTQVKKKPLCLQREAKVPHLPADKARGTQGPEQQHLLITAPSSSSSSLESSASALDRRAPTRNQPQAPGVEASGAGEARASTGSSDSSPGGHGTQVNVTCIVNVCSSSDHSSQCSSQASSTMGDTDSSPSESPKDEQVPFSKEECAFRSQLETPETLLGSTEEKPLPLGVPDAGMKPSRVKFSRSADAPAYKQGQNQLYNELNLGRREEYDVLDKRRGRDPEMGGKPRRKNPQEGLYNELQKDKMAEAYSEIGMKGERRRGKGHDGLYQGLSTATKDTYDALHMQALPPR

SEQ ID NO: 38 - protein, 518 aa, Artificial Sequence
  CSR 82DH.2TF2z
MALPVTALLLPLALLLHAARPKEITNALETWGALGQDINLDIPSFQMSDDIDDIKWEKTSDKKKIAQFRKEKETFKEKDTYKLFKNGTLKIKHLKTDDQDIYKVSIYHTKGKNVLEKIFDLKIQERVSKPKISWTCINTTLTCEVMNGTDPELNLYQDGKHLKLSQRVITHKWTTSLSAKFKCTAGNKVSKESSVEPVSCPEKGLDIYLIIGICGGGSLLMVFVALLVFYITKKKPLCLQREAKVPHLPADKARGTQGPEQQHLLITAPSSSSSSLESSASALDRRAPTRNQPQAPGVEASGAGEARASTGSSDSSPGGHGTQVNVTCIVNVCSSSDHSSQCSSQASSTMGDTDSSPSESPKDEQVPFSKEECAFRSQLETPETLLGSTEEKPLPLGVPDAGMKPSRVKFSRSADAPAYKQGQNQLYNELNLGRREEYDVLDKRRGRDPEMGGKPRRKNPQEGLYNELQKDKMAEAYSEIGMKGERRRGKGHDGLYQGLSTATKDTYDALHMQALPPR

SEQ ID NO: 39 - protein, 546 aa, Artificial Sequence
  CSR 8BBB
MALPVTALLLPLALLLHAARPAVNGTSQFTCFYNSRANISCVWSQDGALQDTSCQVHAWPDRRRWNQTCELLPVSQASWACNLILGAPDSQKLTTVDIVTLRVLCREGVRWRVMAIQDFKPFENLRLMAPISLQVVHVETHRCNISWEISQASHYFERHLEFEARTLSPGHTWEEAPLLTLKQKQEWICLETLTPDTQYEFQVRVKPLQGEFTTWSPWSQPLAFRTKPAALGKDTIPWLGHLLVGLSGAFGFIILVYLLINCRNTGPWLKKVLKCNTPDPSKFFSQLSSEHGGDVQKWLSSPFPSSSFSPGGLAPEISPLEVLERDKVTQLLLQQDKVPEPASLSSNHSLTSCFTNQGYFFFHLPDALEIEACQVYFTYDPYSEEDPDEGVAGAPTGSSPQPLQPLSGEDDAYCTFPSRDDLLLFSPSLLGGPSPPSTAPGGSGAGEERMPPSLQERVPRDWDPQPLGPPTPGVPDLVDFQPPPELVLREAGEEVPDAGPREGVSFPWSRPPGQGEFRALNARLPLNTDAYLSLQELQGQDPTHLV

SEQ ID NO: 40 - protein, 658 aa, Artificial Sequence
  CSR 8BBBz
MALPVTALLLPLALLLHAARPAVNGTSQFTCFYNSRANISCVWSQDGALQDTSCQVHAWPDRRRWNQTCELLPVSQASWACNLILGAPDSQKLTTVDIVTLRVLCREGVRWRVMAIQDFKPFENLRLMAPISLQVVHVETHRCNISWEISQASHYFERHLEFEARTLSPGHTWEEAPLLTLKQKQEWICLETLTPDTQYEFQVRVKPLQGEFTTWSPWSQPLAFRTKPAALGKDTIPWLGHLLVGLSGAFGFIILVYLLINCRNTGPWLKKVLKCNTPDPSKFFSQLSSEHGGDVQKWLSSPFPSSSFSPGGLAPEISPLEVLERDKVTQLLLQQDKVPEPASLSSNHSLTSCFTNQGYFFFHLPDALEIEACQVYFTYDPYSEEDPDEGVAGAPTGSSPQPLQPLSGEDDAYCTFPSRDDLLLFSPSLLGGPSPPSTAPGGSGAGEERMPPSLQERVPRDWDPQPLGPPTPGVPDLVDFQPPPELVLREAGEEVPDAGPREGVSFPWSRPPGQGEFRALNARLPLNTDAYLSLQELQGQDPTHLVRVKFSRSADAPAYKQGQNQLYNELNLGRREEYDVLDKRRGRDPEMGGKPRRKNPQEGLYNELQKDKMAEAYSEIGMKGERRRGKGHDGLYQGLSTATKDTYDALHMQALPPR

SEQ ID NO: 41 - protein, 517 aa, Artificial Sequence
  CSR 82BB
MALPVTALLLPLALLLHAARPKEITNALETWGALGQDINLDIPSFQMSDDIDDIKWEKTSDKKKIAQFRKEKETFKEKDTYKLFKNGTLKIKHLKTDDQDIYKVSIYHTKGKNVLEKIFDLKIQERVSKPKISWTCINTTLTCEVMNGTDPELNLYQDGKHLKLSQRVITHKWTTSLSAKFKCTAGNKVSKESSVEPVSCPEKGLDIPWLGHLLVGLSGAFGFIILVYLLINCRNTGPWLKKVLKCNTPDPSKFFSQLSSEHGGDVQKWLSSPFPSSSFSPGGLAPEISPLEVLERDKVTQLLLQQDKVPEPASLSSNHSLTSCFTNQGYFFFHLPDALEIEACQVYFTYDPYSEEDPDEGVAGAPTGSSPQPLQPLSGEDDAYCTFPSRDDLLLFSPSLLGGPSPPSTAPGGSGAGEERMPPSLQERVPRDWDPQPLGPPTPGVPDLVDFQPPPELVLREAGEEVPDAGPREGVSFPWSRPPGQGEFRALNARLPLNTDAYLSLQELQGQDPTHLV

SEQ ID NO: 42 - protein, 629 aa, Artificial Sequence
  CSR 82BBz
MALPVTALLLPLALLLHAARPKEITNALETWGALGQDINLDIPSFQMSDDIDDIKWEKTSDKKKIAQFRKEKETFKEKDTYKLFKNGTLKIKHLKTDDQDIYKVSIYHTKGKNVLEKIFDLKIQERVSKPKISWTCINTTLTCEVMNGTDPELNLYQDGKHLKLSQRVITHKWTTSLSAKFKCTAGNKVSKESSVEPVSCPEKGLDIPWLGHLLVGLSGAFGFIILVYLLINCRNTGPWLKKVLKCNTPDPSKFFSQLSSEHGGDVQKWLSSPFPSSSFSPGGLAPEISPLEVLERDKVTQLLLQQDKVPEPASLSSNHSLTSCFTNQGYFFFHLPDALEIEACQVYFTYDPYSEEDPDEGVAGAPTGSSPQPLQPLSGEDDAYCTFPSRDDLLLFSPSLLGGPSPPSTAPGGSGAGEERMPPSLQERVPRDWDPQPLGPPTPGVPDLVDFQPPPELVLREAGEEVPDAGPREGVSFPWSRPPGQGEFRALNARLPLNTDAYLSLQELQGQDPTHLVRVKFSRSADAPAYKQGQNQLYNELNLGRREEYDVLDKRRGRDPEMGGKPRRKNPQEGLYNELQKDKMAEAYSEIGMKGERRRGKGHDGLYQGLSTATKDTYDALHMQALPPR

SEQ ID NO: 43 - protein, 518 aa, Artificial Sequence
  CSR 822B
MALPVTALLLPLALLLHAARPKEITNALETWGALGQDINLDIPSFQMSDDIDDIKWEKTSDKKKIAQFRKEKETFKEKDTYKLFKNGTLKIKHLKTDDQDIYKVSIYHTKGKNVLEKIFDLKIQERVSKPKISWTCINTTLTCEVMNGTDPELNLYQDGKHLKLSQRVITHKWTTSLSAKFKCTAGNKVSKESSVEPVSCPEKGLDIYLIIGICGGGSLLMVFVALLVFYITNCRNTGPWLKKVLKCNTPDPSKFFSQLSSEHGGDVQKWLSSPFPSSSFSPGGLAPEISPLEVLERDKVTQLLLQQDKVPEPASLSSNHSLTSCFTNQGYFFFHLPDALEIEACQVYFTYDPYSEEDPDEGVAGAPTGSSPQPLQPLSGEDDAYCTFPSRDDLLLFSPSLLGGPSPPSTAPGGSGAGEERMPPSLQERVPRDWDPQPLGPPTPGVPDLVDFQPPPELVLREAGEEVPDAGPREGVSFPWSRPPGQGEFRALNARLPLNTDAYLSLQELQGQDPTHLV

SEQ ID NO: 44 - protein, 630 aa, Artificial Sequence
  CSR 822Bz
MALPVTALLLPLALLLHAARPKEITNALETWGALGQDINLDIPSFQMSDDIDDIKWEKTSDKKKIAQFRKEKETFKEKDTYKLFKNGTLKIKHLKTDDQDIYKVSIYHTKGKNVLEKIFDLKIQERVSKPKISWTCINTTLTCEVMNGTDPELNLYQDGKHLKLSQRVITHKWTTSLSAKFKCTAGNKVSKESSVEPVSCPEKGLDIYLIIGICGGGSLLMVFVALLVFYITNCRNTGPWLKKVLKCNTPDPSKFFSQLSSEHGGDVQKWLSSPFPSSSFSPGGLAPEISPLEVLERDKVTQLLLQQDKVPEPASLSSNHSLTSCFTNQGYFFFHLPDALEIEACQVYFTYDPYSEEDPDEGVAGAPTGSSPQPLQPLSGEDDAYCTFPSRDDLLLFSPSLLGGPSPPSTAPGGSGAGEERMPPSLQERVPRDWDPQPLGPPTPGVPDLVDFQPPPELVLREAGEEVPDAGPREGVSFPWSRPPGQGEFRALNARLPLNTDAYLSLQELQGQDPTHLVRVKFSRSADAPAYKQGQNQLYNELNLGRREEYDVLDKRRGRDPEMGGKPRRKNPQEGLYNELQKDKMAEAYSEIGMKGERRRGKGHDGLYQGLSTATKDTYDALHMQALPPR

SEQ ID NO: 45 - protein, 368 aa, Artificial Sequence
  CSR 8GGG
MALPVTALLLPLALLLHAARPLNTTILTPNGNEDTTADFFLTTMPTDSLSVSTLPLPEVQCFVFNVEYMNCTWNSSSEPQPTNLTLHYWYKNSDNDKVQKCSHYLFSEEITSGCQLQKKEIHLYQTFVVQLQDPREPRRQATQMLKLQNLVIPWAPENLTLHKLSESQLELNWNNRFLNHCLEHLVQYRTDWDHSWTEQSVDYRHKFSLPSVDGQKRYTFRVRSRFNPLCGSAQHWSEWSHPIHWGSNTSKENPFLFALEAVVISVGSMGLIISLLCVYFWLERTMPRIPTLKNLEDLVTEYHGNFSAWSGVSKGLAESLQPDYSERLCLVSEIPPKGGALGEGPGASPCNQHSPYWAPPCYTLKPET

SEQ ID NO: 46 - protein, 480 aa, Artificial Sequence
  CSR 8GGGz
MALPVTALLLPLALLLHAARPLNTTILTPNGNEDTTADFFLTTMPTDSLSVSTLPLPEVQCFVFNVEYMNCTWNSSSEPQPTNLTLHYWYKNSDNDKVQKCSHYLFSEEITSGCQLQKKEIHLYQTFVVQLQDPREPRRQATQMLKLQNLVIPWAPENLTLHKLSESQLELNWNNRFLNHCLEHLVQYRTDWDHSWTEQSVDYRHKFSLPSVDGQKRYTFRVRSRFNPLCGSAQHWSEWSHPIHWGSNTSKENPFLFALEAVVISVGSMGLIISLLCVYFWLERTMPRIPTLKNLEDLVTEYHGNFSAWSGVSKGLAESLQPDYSERLCLVSEIPPKGGALGEGPGASPCNQHSPYWAPPCYTLKPETRVKFSRSADAPAYKQGQNQLYNELNLGRREEYDVLDKRRGRDPEMGGKPRRKNPQEGLYNELQKDKMAEAYSEIGMKGERRRGKGHDGLYQGLSTATKDTYDALHMQALPPR

SEQ ID NO: 47 - protein, 314 aa, Artificial Sequence
  CSR 82GG
MALPVTALLLPLALLLHAARPKEITNALETWGALGQDINLDIPSFQMSDDIDDIKWEKTSDKKKIAQFRKEKETFKEKDTYKLFKNGTLKIKHLKTDDQDIYKVSIYHTKGKNVLEKIFDLKIQERVSKPKISWTCINTTLTCEVMNGTDPELNLYQDGKHLKLSQRVITHKWTTSLSAKFKCTAGNKVSKESSVEPVSCPEKGLDAVVISVGSMGLIISLLCVYFWLERTMPRIPTLKNLEDLVTEYHGNFSAWSGVSKGLAESLQPDYSERLCLVSEIPPKGGALGEGPGASPCNQHSPYWAPPCYTLKPET

SEQ ID NO: 48 - protein, 426 aa, Artificial Sequence
  CSR 82GGz
MALPVTALLLPLALLLHAARPKEITNALETWGALGQDINLDIPSFQMSDDIDDIKWEKTSDKKKIAQFRKEKETFKEKDTYKLFKNGTLKIKHLKTDDQDIYKVSIYHTKGKNVLEKIFDLKIQERVSKPKISWTCINTTLTCEVMNGTDPELNLYQDGKHLKLSQRVITHKWTTSLSAKFKCTAGNKVSKESSVEPVSCPEKGLDAVVISVGSMGLIISLLCVYFWLERTMPRIPTLKNLEDLVTEYHGNFSAWSGVSKGLAESLQPDYSERLCLVSEIPPKGGALGEGPGASPCNQHSPYWAPPCYTLKPETRVKFSRSADAPAYKQGQNQLYNELNLGRREEYDVLDKRRGRDPEMGGKPRRKNPQEGLYNELQKDKMAEAYSEIGMKGERRRGKGHDGLYQGLSTATKDTYDALHMQALPPR

SEQ ID NO: 49 - protein, 318 aa, Artificial Sequence
  CSR 822G
MALPVTALLLPLALLLHAARPKEITNALETWGALGQDINLDIPSFQMSDDIDDIKWEKTSDKKKIAQFRKEKETFKEKDTYKLFKNGTLKIKHLKTDDQDIYKVSIYHTKGKNVLEKIFDLKIQERVSKPKISWTCINTTLTCEVMNGTDPELNLYQDGKHLKLSQRVITHKWTTSLSAKFKCTAGNKVSKESSVEPVSCPEKGLDIYLIIGICGGGSLLMVFVALLVFYITERTMPRIPTLKNLEDLVTEYHGNFSAWSGVSKGLAESLQPDYSERLCLVSEIPPKGGALGEGPGASPCNQHSPYWAPPCYTLKPET

SEQ ID NO: 50 - protein, 430 aa, Artificial Sequence
  CSR 822Gz
MALPVTALLLPLALLLHAARPKEITNALETWGALGQDINLDIPSFQMSDDIDDIKWEKTSDKKKIAQFRKEKETFKEKDTYKLFKNGTLKIKHLKTDDQDIYKVSIYHTKGKNVLEKIFDLKIQERVSKPKISWTCINTTLTCEVMNGTDPELNLYQDGKHLKLSQRVITHKWTTSLSAKFKCTAGNKVSKESSVEPVSCPEKGLDIYLIIGICGGGSLLMVFVALLVFYITERTMPRIPTLKNLEDLVTEYHGNFSAWSGVSKGLAESLQPDYSERLCLVSEIPPKGGALGEGPGASPCNQHSPYWAPPCYTLKPETRVKFSRSADAPAYKQGQNQLYNELNLGRREEYDVLDKRRGRDPEMGGKPRRKNPQEGLYNELQKDKMAEAYSEIGMKGERRRGKGHDGLYQGLSTATKDTYDALHMQALPPR

SEQ ID NO: 51 - protein, 603 aa, Artificial Sequence
  CSR 82BBG
MALPVTALLLPLALLLHAARPKEITNALETWGALGQDINLDIPSFQMSDDIDDIKWEKTSDKKKIAQFRKEKETFKEKDTYKLFKNGTLKIKHLKTDDQDIYKVSIYHTKGKNVLEKIFDLKIQERVSKPKISWTCINTTLTCEVMNGTDPELNLYQDGKHLKLSQRVITHKWTTSLSAKFKCTAGNKVSKESSVEPVSCPEKGLDIPWLGHLLVGLSGAFGFIILVYLLINCRNTGPWLKKVLKCNTPDPSKFFSQLSSEHGGDVQKWLSSPFPSSSFSPGGLAPEISPLEVLERDKVTQLLLQQDKVPEPASLSSNHSLTSCFTNQGYFFFHLPDALEIEACQVYFTYDPYSEEDPDEGVAGAPTGSSPQPLQPLSGEDDAYCTFPSRDDLLLFSPSLLGGPSPPSTAPGGSGAGEERMPPSLQERVPRDWDPQPLGPPTPGVPDLVDFQPPPELVLREAGEEVPDAGPREGVSFPWSRPPGQGEFRALNARLPLNTDAYLSLQELQGQDPTHLVERTMPRIPTLKNLEDLVTEYHGNFSAWSGVSKGLAESLQPDYSERLCLVSEIPPKGGALGEGPGASPCNQHSPYWAPPCYTLKPET

SEQ ID NO: 52 - protein, 715 aa, Artificial Sequence
  CSR 82BBGz
MALPVTALLLPLALLLHAARPKEITNALETWGALGQDINLDIPSFQMSDDIDDIKWEKTSDKKKIAQFRKEKETFKEKDTYKLFKNGTLKIKHLKTDDQDIYKVSIYHTKGKNVLEKIFDLKIQERVSKPKISWTCINTTLTCEVMNGTDPELNLYQDGKHLKLSQRVITHKWTTSLSAKFKCTAGNKVSKESSVEPVSCPEKGLDIPWLGHLLVGLSGAFGFIILVYLLINCRNTGPWLKKVLKCNTPDPSKFFSQLSSEHGGDVQKWLSSPFPSSSFSPGGLAPEISPLEVLERDKVTQLLLQQDKVPEPASLSSNHSLTSCFTNQGYFFFHLPDALEIEACQVYFTYDPYSEEDPDEGVAGAPTGSSPQPLQPLSGEDDAYCTFPSRDDLLLFSPSLLGGPSPPSTAPGGSGAGEERMPPSLQERVPRDWDPQPLGPPTPGVPDLVDFQPPPELVLREAGEEVPDAGPREGVSFPWSRPPGQGEFRALNARLPLNTDAYLSLQELQGQDPTHLVERTMPRIPTLKNLEDLVTEYHGNFSAWSGVSKGLAESLQPDYSERLCLVSEIPPKGGALGEGPGASPCNQHSPYWAPPCYTLKPETRVKFSRSADAPAYKQGQNQLYNELNLGRREEYDVLDKRRGRDPEMGGKPRRKNPQEGLYNELQKDKMAEAYSEIGMKGERRRGKGHDGLYQGLSTATKDTYDALHMQALPPR

SEQ ID NO: 53 - protein, 604 aa, Artificial Sequence
  CSR 822BG
MALPVTALLLPLALLLHAARPKEITNALETWGALGQDINLDIPSFQMSDDIDDIKWEKTSDKKKIAQFRKEKETFKEKDTYKLFKNGTLKIKHLKTDDQDIYKVSIYHTKGKNVLEKIFDLKIQERVSKPKISWTCINTTLTCEVMNGTDPELNLYQDGKHLKLSQRVITHKWTTSLSAKFKCTAGNKVSKESSVEPVSCPEKGLDIYLIIGICGGGSLLMVFVALLVFYITNCRNTGPWLKKVLKCNTPDPSKFFSQLSSEHGGDVQKWLSSPFPSSSFSPGGLAPEISPLEVLERDKVTQLLLQQDKVPEPASLSSNHSLTSCFTNQGYFFFHLPDALEIEACQVYFTYDPYSEEDPDEGVAGAPTGSSPQPLQPLSGEDDAYCTFPSRDDLLLFSPSLLGGPSPPSTAPGGSGAGEERMPPSLQERVPRDWDPQPLGPPTPGVPDLVDFQPPPELVLREAGEEVPDAGPREGVSFPWSRPPGQGEFRALNARLPLNTDAYLSLQELQGQDPTHLVERTMPRIPTLKNLEDLVTEYHGNFSAWSGVSKGLAESLQPDYSERLCLVSEIPPKGGALGEGPGASPCNQHSPYWAPPCYTLKPET

SEQ ID NO: 54 - protein, 716 aa, Artificial Sequence
  CSR 822BGz
MALPVTALLLPLALLLHAARPKEITNALETWGALGQDINLDIPSFQMSDDIDDIKWEKTSDKKKIAQFRKEKETFKEKDTYKLFKNGTLKIKHLKTDDQDIYKVSIYHTKGKNVLEKIFDLKIQERVSKPKISWTCINTTLTCEVMNGTDPELNLYQDGKHLKLSQRVITHKWTTSLSAKFKCTAGNKVSKESSVEPVSCPEKGLDIYLIIGICGGGSLLMVFVALLVFYITNCRNTGPWLKKVLKCNTPDPSKFFSQLSSEHGGDVQKWLSSPFPSSSFSPGGLAPEISPLEVLERDKVTQLLLQQDKVPEPASLSSNHSLTSCFTNQGYFFFHLPDALEIEACQVYFTYDPYSEEDPDEGVAGAPTGSSPQPLQPLSGEDDAYCTFPSRDDLLLFSPSLLGGPSPPSTAPGGSGAGEERMPPSLQERVPRDWDPQPLGPPTPGVPDLVDFQPPPELVLREAGEEVPDAGPREGVSFPWSRPPGQGEFRALNARLPLNTDAYLSLQELQGQDPTHLVERTMPRIPTLKNLEDLVTEYHGNFSAWSGVSKGLAESLQPDYSERLCLVSEIPPKGGALGEGPGASPCNQHSPYWAPPCYTLKPETRVKFSRSADAPAYKQGQNQLYNELNLGRREEYDVLDKRRGRDPEMGGKPRRKNPQEGLYNELQKDKMAEAYSEIGMKGERRRGKGHDGLYQGLSTATKDTYDALHMQALPPR

SEQ ID NO: 55 - protein, 600 aa, Artificial Sequence
  CSR 82GGB
MALPVTALLLPLALLLHAARPKEITNALETWGALGQDINLDIPSFQMSDDIDDIKWEKTSDKKKIAQFRKEKETFKEKDTYKLFKNGTLKIKHLKTDDQDIYKVSIYHTKGKNVLEKIFDLKIQERVSKPKISWTCINTTLTCEVMNGTDPELNLYQDGKHLKLSQRVITHKWTTSLSAKFKCTAGNKVSKESSVEPVSCPEKGLDAVVISVGSMGLIISLLCVYFWLERTMPRIPTLKNLEDLVTEYHGNFSAWSGVSKGLAESLQPDYSERLCLVSEIPPKGGALGEGPGASPCNQHSPYWAPPCYTLKPETNCRNTGPWLKKVLKCNTPDPSKFFSQLSSEHGGDVQKWLSSPFPSSSFSPGGLAPEISPLEVLERDKVTQLLLQQDKVPEPASLSSNHSLTSCFTNQGYFFFHLPDALEIEACQVYFTYDPYSEEDPDEGVAGAPTGSSPQPLQPLSGEDDAYCTFPSRDDLLLFSPSLLGGPSPPSTAPGGSGAGEERMPPSLQERVPRDWDPQPLGPPTPGVPDLVDFQPPPELVLREAGEEVPDAGPREGVSFPWSRPPGQGEFRALNARLPLNTDAYLSLQELQGQDPTHLV

SEQ ID NO: 56 - protein, 712 aa, Artificial Sequence
  CSR 82GGBz
MALPVTALLLPLALLLHAARPKEITNALETWGALGQDINLDIPSFQMSDDIDDIKWEKTSDKKKIAQFRKEKETFKEKDTYKLFKNGTLKIKHLKTDDQDIYKVSIYHTKGKNVLEKIFDLKIQERVSKPKISWTCINTTLTCEVMNGTDPELNLYQDGKHLKLSQRVITHKWTTSLSAKFKCTAGNKVSKESSVEPVSCPEKGLDAVVISVGSMGLIISLLCVYFWLERTMPRIPTLKNLEDLVTEYHGNFSAWSGVSKGLAESLQPDYSERLCLVSEIPPKGGALGEGPGASPCNQHSPYWAPPCYTLKPETNCRNTGPWLKKVLKCNTPDPSKFFSQLSSEHGGDVQKWLSSPFPSSSFSPGGLAPEISPLEVLERDKVTQLLLQQDKVPEPASLSSNHSLTSCFTNQGYFFFHLPDALEIEACQVYFTYDPYSEEDPDEGVAGAPTGSSPQPLQPLSGEDDAYCTFPSRDDLLLFSPSLLGGPSPPSTAPGGSGAGEERMPPSLQERVPRDWDPQPLGPPTPGVPDLVDFQPPPELVLREAGEEVPDAGPREGVSFPWSRPPGQGEFRALNARLPLNTDAYLSLQELQGQDPTHLVRVKFSRSADAPAYKQGQNQLYNELNLGRREEYDVLDKRRGRDPEMGGKPRRKNPQEGLYNELQKDKMAEAYSEIGMKGERRRGKGHDGLYQGLSTATKDTYDALHMQALPPR

SEQ ID NO: 57 - protein, 604 aa, Artificial Sequence
  CSR 822GB
MALPVTALLLPLALLLHAARPKEITNALETWGALGQDINLDIPSFQMSDDIDDIKWEKTSDKKKIAQFRKEKETFKEKDTYKLFKNGTLKIKHLKTDDQDIYKVSIYHTKGKNVLEKIFDLKIQERVSKPKISWTCINTTLTCEVMNGTDPELNLYQDGKHLKLSQRVITHKWTTSLSAKFKCTAGNKVSKESSVEPVSCPEKGLDIYLIIGICGGGSLLMVFVALLVFYITERTMPRIPTLKNLEDLVTEYHGNFSAWSGVSKGLAESLQPDYSERLCLVSEIPPKGGALGEGPGASPCNQHSPYWAPPCYTLKPETNCRNTGPWLKKVLKCNTPDPSKFFSQLSSEHGGDVQKWLSSPFPSSSFSPGGLAPEISPLEVLERDKVTQLLLQQDKVPEPASLSSNHSLTSCFTNQGYFFFHLPDALEIEACQVYFTYDPYSEEDPDEGVAGAPTGSSPQPLQPLSGEDDAYCTFPSRDDLLLFSPSLLGGPSPPSTAPGGSGAGEERMPPSLQERVPRDWDPQPLGPPTPGVPDLVDFQPPPELVLREAGEEVPDAGPREGVSFPWSRPPGQGEFRALNARLPLNTDAYLSLQELQGQDPTHLV

SEQ ID NO: 58 - protein, 716 aa, Artificial Sequence
  CSR 822GBz
MALPVTALLLPLALLLHAARPKEITNALETWGALGQDINLDIPSFQMSDDIDDIKWEKTSDKKKIAQFRKEKETFKEKDTYKLFKNGTLKIKHLKTDDQDIYKVSIYHTKGKNVLEKIFDLKIQERVSKPKISWTCINTTLTCEVMNGTDPELNLYQDGKHLKLSQRVITHKWTTSLSAKFKCTAGNKVSKESSVEPVSCPEKGLDIYLIIGICGGGSLLMVFVALLVFYITERTMPRIPTLKNLEDLVTEYHGNFSAWSGVSKGLAESLQPDYSERLCLVSEIPPKGGALGEGPGASPCNQHSPYWAPPCYTLKPETNCRNTGPWLKKVLKCNTPDPSKFFSQLSSEHGGDVQKWLSSPFPSSSFSPGGLAPEISPLEVLERDKVTQLLLQQDKVPEPASLSSNHSLTSCFTNQGYFFFHLPDALEIEACQVYFTYDPYSEEDPDEGVAGAPTGSSPQPLQPLSGEDDAYCTFPSRDDLLLFSPSLLGGPSPPSTAPGGSGAGEERMPPSLQERVPRDWDPQPLGPPTPGVPDLVDFQPPPELVLREAGEEVPDAGPREGVSFPWSRPPGQGEFRALNARLPLNTDAYLSLQELQGQDPTHLVRVKFSRSADAPAYKQGQNQLYNELNLGRREEYDVLDKRRGRDPEMGGKPRRKNPQEGLYNELQKDKMAEAYSEIGMKGERRRGKGHDGLYQGLSTATKDTYDALHMQALPPR

SEQ ID NO: 59-61 - skipped (3 entries)

SEQ ID NO: 62 - protein, 394 aa, Artificial Sequence
  inducible proapoptotic polypeptide
GVQVETISPGDGRTFPKRGQTCVVHYTGMLEDGKKVDSSRDRNKPFKFMLGKQEVIRGWEEGVAQMSVGQRAKLTISPDYAYGATGHPGIIPPHATLVFDVELLKLEGGGGSGFGDVGALESLRGNADLAYILSMEPCGHCLIINNVNFCRESGLRTRTGSNIDCEKLRRRFSSLHFMVEVKGDLTAKKMVLALLELAQQDHGALDCCVVVILSHGCQASHLQFPGAVYGTDGCPVSVEKIVNIFNGTSCPSLGGKPKLFFIQACGGEQKDHGFEVASTSPEDESPGSNPEPDATPFQEGLRTFDQLDAISSLPTPSDIFVSYSTFPGFVSWRDPKSGSWYVETLDDIFEQWAHSEDLQSLLLRVANAVSVKGIYKQMPGCFNFLRKKLFFKTS

SEQ ID NO: 63 - protein, 337 aa, Artificial Sequence
  HLA-E polypeptide
GSHSLKYFHTSVSRPGRGEPRFISVGYVDDTQFVRFDNDAASPRMVPRAPWMEQEGSEYWDRETRSARDTAQIFRVNLRTLRGYYNQSEAGSHTLQWMHGCELGPDGRFLRGYEQFAYDGKDYLTLNEDLRSWTAVDTAAQISEQKSNDASEAEHQRAYLEDTCVEWLHKYLEKGKETLLHLEPPKTHVTHHPISDHEATLRCWALGFYPAEITLTWQQDGEGHTQDTELVETRPAGDGTFQKWAAVVVPSGEEQRYTCHVQHEGLPEPVTLRWKPASQPTIPIVGIIAGLVLLGSVVSGAVVAAVIWRKKSSGGKGGSYSKAEWSDSAQGSESHSL

SEQ ID NO: 64 - protein, 20 aa, Artificial Sequence
  B2M signal peptide
MSRSVALAVLALLSLSGLEA

SEQ ID NO: 65 - protein, 99 aa, Artificial Sequence [sequence omitted]

SEQ ID NO: 66 - protein, 20 aa, Artificial Sequence
  linker
GGGGSGGGGSGGGGSGGGGS

SEQ ID NO: 67 - protein, 9 aa, Artificial Sequence
  peptide
VMAPRTLIL

SEQ ID NO: 68 - protein, 15 aa, Artificial Sequence
  linker
GGGGSGGGGSGGGGS

SEQ ID NO: 69 - protein, 499 aa, Artificial Sequence
  non-naturally occurring polypeptide comprising an HLA-E
MSRSVALAVLALLSLSGLEAVMAPRTLILGGGGSGGGGSGGGGSIQRTPKIQVYSRHPAENGKSNFLNCYVSGFHPSDIEVDLLKNGERIEKVEHSDLSFSKDWSFYLLYYTEFTPTEKDEYACRVNHVTLSQPKIVKWDRDMGGGGSGGGGSGGGGSGGGGSGSHSLKYFHTSVSRPGRGEPRFISVGYVDDTQFVRFDNDAASPRMVPRAPWMEQEGSEYWDRETRSARDTAQIFRVNLRTLRGYYNQSEAGSHTLQWMHGCELGPDGRFLRGYEQFAYDGKDYLTLNEDLRSWTAVDTAAQISEQKSNDASEAEHQRAYLEDTCVEWLHKYLEKGKETLLHLEPPKTHVTHHPISDHEATLRCWALGFYPAEITLTWQQDGEGHTQDTELVETRPAGDGTFQKWAAVWPSGEEQRYTCHVQHEGLPEPVTLRWKPASQPTIPIVGIIAGLVLLGSVVSGAVVAAVIWRKKSSGGKGGSYSKAEWSDSAQGSESHSL

SEQ ID NO: 70 - DNA, 1498 bp, Artificial Sequence
  non-naturally occurring polypeptide comprising an HLA-E
atgtctcgcagcgtggccctggccgtgctggccctgctgtccctgtctggcctggaggccgtgatggccccccggaccctgatcctgggaggaggaggcagcggcggaggaggctccggaggcggcggctctatccagcgcacacctaagatccaggtgtattctcggcacccagccgagaacggcaagagcaacttcctgaattgctacgtgagcggctttcacccttccgacatcgaggtggatctgctgaagaatggcgagagaatcgagaaggtggagcactccgacctgagcttctccaaggattggtcatctgctgtactataccgagtttacccctacagagaaggacgagtacgcctgtcgcgtgaaccacgtgacactgtcccagccaaagatcgtgaagtgggaccgggatatgggcggcggcggctctggcggcggcggcagcggcggcggcggctccggaggaggcggctctggcagccactccctgaagtatttccacacctctgtgagccggccaggcagaggagagccacggttcatctctgtgggctacgtggacgatacacagttcgtgaggtttgacaatgatgccgccagcccaagaatggtgcctagggccccatggatggagcaggagggcagcgagtattgggacagggagacccggagcgccagagacacagcacagattttccgggtgaacctgagaaccctgaggggctactataatcagtccgaggccggctctcacacactccagtggatgcacggatgcgagctgggaccagatggccgcttcctgcggggctacgagcagtttgcctatgacggcaaggattacctgaccctgaacgaggacctgagatcctggaccgccgtggatacagccgcccagatcagcgagcagaagtccaatgacgcatctgaggcagagcaccagagggcatatctggaggatacctgcgtggagtggctgcacaagtacctggagaagggcaaggagacactgctgcacctggagccccctaagacccacgtgacacaccacccaatcagcgaccacgaggccaccctgaggtgttgggcactgggcttctatcccgccgagatcaccctgacatggcagcaggacggagagggacacacccaggatacagagctggtggagaccaggcccgccggcgatggcacatttcagaagtgggccgccgtggtggtgccttccggagaggagcagagatacacctgtcacgtgcagcacgagggactgccagagccagtgaccctgaggtggaagcctgccagccagcccacaatccctatcgtgggaatcatcgcaggcctggtgctgctgggctctgtggtgagcggagcagtggtggccgccgtgatctggcggaagaagagcagcggaggcaagggaggctcctactccaaggcagagtggagcgactccgcccagggctctgagagccactccctgtga

SEQ ID NO: 71 - protein, 476 aa, Artificial Sequence
  non-naturally occurring polypeptide comprising an HLA-E
MSRSVALAVLALLSLSGLEAIQRTPKIQVYSRHPAENGKSNFLNCYVSGFHPSDIEVDLLKNGERIEKVEHSDLSFSKDWSFYLLYYTEFTPTEKDEYACRVNHVTLSQPKIVKWDRDMGGGGSGGGGSGGGGSGGGGSGSHSLKYFHTSVSRPGRGEPRFISVGYVDDTQFVRFDNDAASPRMVPRAPWMEQEGSEYWDRETRSARDTAQIFRVNLRTLRGYYNQSEAGSHTLQWMHGCELGPDRRFLRGYEQFAYDGKDYLTLNEDLRSWTAVDTAAQISEQKSNDASEAEHQRAYLEDTCVEWLHKYLEKGKETLLHLEPPKTHVTHHPISDHEATLRCWALGFYPAEITLTWQQDGEGHTQDTELVETRPAGDGTFQKWAAVVVPSGEEQRYTCHVQHEGLPEPVTLRWKPASQPTIPIVGIIAGLVLLGSVVSGAVVAAVIWRKKSSGGKGGSYYKAEWSDSAQGSESHSL

SEQ ID NO: 72 - DNA, 1431 bp, Artificial Sequence
  non-naturally occurring polypeptide comprising an HLA-E
atgagcagatctgtggccctggctgttctggctctgctgtctctgtctggcctggaagccatccagcggacccctaagatccaggtgtacagcagacaccccgccgagaacggcaagagcaacttcctgaactgctacgtgtccggctttcaccccagcgacattgaggtggacctgctgaagaacggcgagcggatcgagaaggtggaacacagcgatctgagcttcagcaaggactggtccttctacctgctgtactacaccgagttcacccctaccgagaaggacgagtacgcctgcagagtgaaccacgtgacactgagccagcctaagatcgtgaagtgggacagagatatgggcggaggcggatctggtggcggaggaagtggcggcggaggatctggcggtggtggttctggatctcacagcctgaagtactttcacacctccgtgtccagacctggcagaggcgagcctagattcatcagcgtgggctacgtggacgacacccagttcgtcagattcgacaacgacgccgcctctcctcggatggttcctagagcaccctggatggaacaagagggcagcgagtactgggatcgcgagacaagaagcgccagagacacagcccagatcttccgcgtgaacctgagaaccctgcggggctactacaatcagtctgaggccggctctcacaccctgcagtggatgcatggatgtgaactgggccccgacagacggttcctgagaggctatgagcagttcgcctacgacggcaaggactacctgacactgaacgaggacctgagaagctggaccgccgtggatacagccgctcagatcagcgagcagaagtctaacgacgccagcgaggccgaacaccagagagcctatctggaagatacctgcgtggaatggctgcacaagtacctggaaaagggcaaagagacactgctgcacctggaacctccaaagacacatgtgacccaccatcctatcagcgaccacgaggccacactgagatgttgggccctgggcttttaccctgccgagatcacactgacatggcagcaggatggcgagggccacacacaggatacagagctggtggaaacaagacctgccggcgacggcaccttccagaaatgggctgctgtggttgtgcccagcggcgaggaacagagatacacctgtcacgtgcagcacgagggactgcctgaacctgtgactctgagatggaagcctgccagccagccaacaatccccatcgtgggaatcattgccggcctggtgctgctgggatctgtggtttctggtgctgtggtggccgccgtgatttggagaaagaagtcctctggcggcaaaggcggctcctactataaggccgagtggagcgattctgcccagggctctgaaagccacagcctgtga

SEQ ID NO: 73 - protein, 357 aa, Artificial Sequence
  non-naturally occurring polypeptide comprising an HLA-E
MSRSVALAVLALLSLSGLEAGSHSLKYFHTSVSRPGRGEPRFISVGYVDDTQFVRFDNDAASPRMVPRAPWMEQEGSEYWDRETRSARDTAQIFRVNLRTLRGYYNQSEAGSHTLQWMHGCELGPDRRFLRGYEQFAYDGKDYLTLNEDLRSWTAVDTAAQISEQKSNDASEAEHQRAYLEDTCVEWLHKYLEKGKETLLHLEPPKTHVTHHPISDHEATLRCWALGFYPAEITLTWQQDGEGHTQDTELVETRPAGDGTFQKWAAVVVPSGEEQRYTCHVQHEGLPEPVTLRWKPASQPTIPIVGIIAGLVLLGSVVSGAVVAAVIWRKKSSGGKGGSYYKAEWSDSAQGSESHSL

SEQ ID NO: 74 - DNA, 1056 bp, Artificial Sequence
  non-naturally occurring polypeptide comprising an HLA-E
atgtctcgcagcgtggccctggccgtgctggccctgctgtccctgtctggcctggaggccggcagccactccctgaagtatttccacacctctgtgagccggccaggcagaggagagccacggttcatctctgtgggctacgtggacgatacacagttcgtgaggtttgacaatgatgccgccagcccaagaatggtgcctagggccccatggatggagcaggagggcagcgagtattgggacagggagacccggagcgccagagacacagcacagattttccgggtgaacctgagaaccctgaggggctactataatcagtccgaggccggctctcacacactccagtggatgcacggatgcgagctgggaccagatcgccgcttcctgcggggctacgagcagtttgcctatgacggcaaggattacctgaccctgaacgaggacctgagatcctggaccgccgtggatacagccgcccagatcagcgagcagaagtccaatgacgcatctgaggcagagcaccagagggcatatctggaggatacctgcgtggagtggctgcacaagtacctggagaagggcaaggagacactgctgcacctggagccccctaagacccacggacacaccacccaatcagcgaccacgaggccaccctgaggtgttgggcactgggcttctatcccgccgagatcaccctgacatggcagcaggacggagagggacacacccaggatacagagctggtggagaccaggcccgccggcgatggcacatttcagaagtgggccgccgtggggtgccttccggagaggagcagagatacacctgtcacgtgcagcacgagggactgccagagccagtgaccctgaggtggaagcctgccagccagcccacaatccctatcgtgggaatcatcgcaggcctggtgctgctgggctctgtggtgagcggagcagtggtggccgccgtgatctggcggaagaagagcagcggaggcaagggaggctcctactataaggcagagtggagcgactccgcccagggctctga

SEQ ID NO: 75 - protein, 187 aa, Artificial Sequence
  DHFR mutein enzyme
MVGSLNCIVAVSQNMGIGKNGDFPWPPLRNESRYFQRMTTTSSVEGKQNLVIMGKKTWFSIPEKNRPLKGRINLVLSRELKEPPQGAHFLSRSLDDALKLTEQPELANKVDMVWIVGGSSVYKEAMNHPGHLKLFVTRIMQDFESDTFFPEIDLEKYKLLPEYPGVLSDVQEEKGIKYKFEVYEKND

SEQ ID NO: 76 - protein, 1591 aa, Artificial Sequence
  fusion protein
MAPKKKRKVEGIKSNISLLKDELRGQISHISHEYLSLIDLAFDSKQNRLFEMKVLELLVNEYGFKGRHLGGSRKPDGIVYSTTLEDNFGIIVDTKAYSEGYSLPISQADEMERYVRENSNRDEEVNPNKWWENFSEEVKKYYFVFISGSFKGKFEEQLRRLSMTTGVNGSAVNVVNLLLGAEKIRSGEMTIEELERAMFNNSEFILKYGGGGSDKKYSIGLAIGTNSVGWAVITDEYKVPSKKFKVLGNTDRHSIKKNLIGALLFDSGETAEATRLKRTARRRYTRRKNRICYLQEIFSNEMAKVDDSFFHRLEESFLVEEDKKHERHPIFGNIVDEVAYHEKYPTIYHLRKKLVDSTDKADLRLIYLALAHMIKFRGHFLIEGDLNPDNSDVDKLFIQLVQTYNQLFEENPINASGVDAKAILSARLSKSRRLENLIAQLPGEKKNGLFGNLIALSLGLTPNFKSNFDLAEDAKLQLSKDTYDDDLDNLLAQIGDQYADLFLAAKNLSDAILLSDILRVNTEITKAPLSASMIKRYDEHHQDLTLLKALVRQQLPEKYKEIFFDQSKNGYAGYIDGGASQEEFYKFIKPILEKMDGTEELLVKLNREDLLRKQRTFDNGSIPHQIHLGELHAILRRQEDFYPFLKDNREKIEKILTFRIPYYVGPLARGNSRFAWMTRKSEETITPWNFEEVVDKGASAQSFIERMTNFDKNLPNEKVLPKHSLLYEYFTVYNELTKVKYVTEGMRKPAFLSGEQKKAIVDLLFKTNRKVTVKQLKEDYFKKIECFDSVEISGVEDRFNASLGTYHDLLKIIKDKDFLDNEENEDILEDIVLTLTLFEDREMIEERLKTYAHLFDDKVMKQLKRRRYTGWGRLSRKLINGIRDKQSGKTILDFLKSDGFANRNFMQLIHDDSLTFKEDIQKAQVSGQGDSLHEHIANLAGSPAIKKGILQTVKVVDELVKVMGRHKPENIVIEMARENQTTQKGQKNSRERMKRIEEGIKELGSQILKEHPVENTQLQNEKLYLYYLQNGRDMYVDQELDINRLSDYDVDAIVPQSFLKDDSIDNKVLTRSDKNRGKSDNVPSEEVVKKMKNYWRQLLNAKLITQRKFDNLTKAERGGLSELDKAGFIKRQLVETRQITKHVAQILDSRMNTKYDENDKLIREVKVITLKSKLVSDFRKDFQFYKVREINNYHHAHDAYLNAVVGTALIKKYPKLESEFVYGDYKVYDVRKMIAKSEQEIGKATAKYFFYSNIMNFFKTEITLANGEIRKRPLIETNGETGEIVWDKGRDFATVRKVLSMPQVNIVKKTEVQTGGFSKESILPKRNSDKLIARKKDWDPKKYGGFDSPTVAYSVLVVAKVEKGKSKKLKSVKELLGITIMERSSFEKNPIDFLEAKGYKEVKKDLIIKLPKYSLFELENGRKRMLASAGELQKGNELALPSKYVNFLYLASHYEKLKGSPEDNEQKQLFVEQHKHYLDEIIEQISEFSKRVILADANLDKVLSAYNKHRDKPIREQAENIIHLFTLTNLGAPAAFKYFDTTIDRKRYTSTKEVLDATLIHQSITGLYETRIDLSQLGGDGSPKKKRKVSS

SEQ ID NO: 77 - DNA, 4776 bp, Artificial Sequence
  fusion polynucleotide
atggcaccaaagaagaaaagaaaagtggagggcatcaagtcaaacatcagcctgctgaaagacgaactgcggggacagattagtcacatcagtcacgagtacctgtcactgattgatctggccttcgacagcaagcagaatagactgtttgagatgaaagtgctggaactgctggtcaacgagtatggcttcaagggcagacatctgggcgggtctaggaaacctgacggcatcgtgtacagtaccacactggaagacaacttcggaatcattgtcgataccaaggcttattccgagggctactctctgccaattagtcaggcagatgagatggaaaggtacgtgcgcgaaaactcaaatagggacgaggaagtcaaccccaataagtggtgggagaatttcagcgaggaagtgaagaaatactacttcgtctttatctcaggcagcttcaaagggaagtttgaggaacagctgcggagactgtccatgactaccggggtgaacggatctgctgtcaacgtggtcaatctgctgctgggcgcagaaaagatcaggtccggggagatgacaattgaggaactggaacgcgccatgttcaacaattctgagtttatcctgaagtatggaggcgggggaagcgataagaaatactccatcggactggccattggcaccaattccgtgggctgggctgtcatcacagacgagtacaaggtgccaagcaagaagttcaaggtcctggggaacaccgatcgccacagtatcaagaaaaatctgattggagccctgctgttcgactcaggcgagactgctgaagcaacccgactgaagcggactgctaggcgccgatatacccggagaaaaaatcggatctgctacctgcaggaaattttcagcaacgagatggccaaggtggacgatagtttctttcaccgcctggaggaatcattcctggtggaggaagataagaaacacgagcggcatcccatctttggcaacattgtggacgaagtcgcttatcacgagaagtaccctactatctatcatctgaggaagaaactggtggactccaccgataaggcagacctgcgcctgatctatctggccctggctcacatgatcaagttccgggggcattttctgatcgagggagatctgaaccctgacaattctgatgtggacaagctgttcatccagctggtccagacatacaatcagctgtttgaggaaaacccaattaatgcctcaggcgtggacgcaaaggccatcctgagcgccagactgtccaaatctaggcgcctggaaaacctgatcgctcagctgccaggagagaagaaaaacggcctgtttgggaatctgattgcactgtccctgggcctgacacccaacttcaagtctaattttgatctggccgaggacgctaagctgcagctgtccaaagacacttatgacgatgacctggataacctgctggctcagatcggcgatcagtacgcagacctgttcctggccgctaagaatctgagtgacgccatcctgctgtcagatattctgcgcgtgaacacagagattactaaggccccactgagtgcttcaatgatcaaaagatatgacgagcaccatcaggatctgaccctgctgaaggctctggtgaggcagcagctgcccgagaaatacaaggaaatcttctttgatcagagcaagaatggatacgccggctatattgacggcggggcttcccaggaggagttctacaagttcatcaagcccattctggaaaagatggacggcaccgaggaactgctggtgaagctgaatcgggaggacctgctgagaaaacagaggacatttgataacggaagcatccctcaccagattcatctgggcgaactgcacgccatcctgcgacggcaggaggacttctacccatttctgaaggataaccgcgagaaaatcgaaaagatcctgaccttcagaatcccctactatgtggggcctctggcacggggaaatagtagatttgcctggatgacaagaaagtcagaggaaactatcaccccctggaacttcgaggaagtggtcgataaaggcgctagcgcacagtccttcattgaaaggatgacaaattttgacaagaacctgccaaatgagaaggtgctgcccaaacacagcctgctgtacgaatatttcacagtgtataacgagctgactaaagtgaagtacgtcaccgaagggatgcgcaagcccgcattcctgtccggagagcagaagaaagccatcgtggacctgctgtttaagacaaatcggaaagtgactgtcaaacagctgaaggaagactatttcaagaaaattgagtgtttcgattcagtggaaatcagcggcgtcgaggacaggtttaacgcctccctggggacctaccacgatctgctgaagatcatcaaggataaggacttcctggacaacgaggaaaatgaggacatcctggaggacattgtgctgacactgactctgtttgaggatcgcgaaatgatcgaggaacgactgaagacttatgcccatctgttcgatgacaaagtgatgaagcagctgaaaagaaggcgctacaccggatggggacgcctgagccgaaaactgatcaatgggattagagacaagcagagcggaaaaactatcctggactttctgaagtccgatggcttcgccaacaggaacttcatgcagctgattcacgatgactctctgaccttcaaggaggacatccagaaagcacaggtgtctggccagggggacagtctgcacgagcatatcgcaaacctggccggcagccccgccatcaagaaagggattctgcagaccgtgaaggtggtggacgaactggtcaaggtcatgggacgacacaaacctgagaacatcgtgattgagatggcccgcgaaaatcagacaactcagaagggccagaaaaacagtcgagaacggatgaagagaatcgaggaaggcatcaaggagctggggtcacagatcctgaaggagcatcctgtggaaaacactcagctgcagaatgagaaactgtatctgtactatctgcagaatggacgggatatgtacgtggaccaggagctggatattaacagactgagtgattatgacgtggatgccatcgtccctcagagcttcctgaaggatgactccattgacaacaaggtgctgaccaggtccgacaagaaccgcggcaaatcagataatgtgccaagcgaggaagtggtcaagaaaatgaagaactactggaggcagctgctgaatgccaagctgatcacacagcggaaatttgataacctgactaaggcagaaagaggaggcctgtctgagctggacaaggccggcttcatcaagcggcagctggtggagacaagacagatcactaagcacgtcgctcagattctggatagcagaatgaacacaaagtacgatgaaaacgacaagctgatcagggaggtgaaagtcattactctgaaatccaagctggtgtctgactttagaaaggatttccagttttataaagtcagggagatcaacaactaccaccatgctcatgacgcatacctgaacgcagtggtcgggaccgccctgattaagaaataccccaagctggagtccgagttcgtgtacggagactataaagtgtacgatgtccggaagatgatcgccaaatctgagcaggaaattggcaaggccaccgctaagtatttcttttacagtaacatcatgaatttctttaagaccgaaatcacactggcaaatggggagatcagaaaaaggcctctgattgagaccaacggggagacaggagaaatcgtgtgggacaagggaagggattttgctaccgtgcgcaaagtcctgtccatgccccaagtgaatattgtcaagaaaactgaagtgcagaccgggggattctctaaggagagtattctgcctaagcgaaactctgataaactgatcgcccggaagaaagactgggaccccaagaagtatggcgggttcgactctccaacagtggcttacagtgtcctggtggtcgcaaaggtggaaaaggggaagtccaagaaactgaagtctgtcaaagagctgctgggaatcactattatggaacgcagctccttcgagaagaatcctatcgattttctggaagccaagggctataaagaggtgaagaaagacctgatcattaagctgccaaaatactcactgtttgagctggaaaacggacgaaagcgaatgctggcaagcgccggagaactgcagaagggcaatgagctggccctgccctccaaatacgtgaacttcctgtatctggctagccactacgagaaactgaaggggtcccctgaggataacgaacagaagcagctgtttgtggagcagcacaaacattatctggacgagatcattgaacagatttcagagttcagcaagagagtgatcctggctgacgcaaatctggataaagtcctgagcgcatacaacaagcaccgagacaaaccaatccgggagcaggccgaaaatatcattcatctgttcaccctgacaaacctgggcgcccctgcagccttcaagtattttgacaccacaatcgatcggaagagatacacttctaccaaagaggtgctggatgctaccctgatccaccagagtattaccggcctgtatgagacacgcatcgacctgtcacagctgggaggcgatgggagccccaagaaaaagcggaaggtgtctagttaa

SEQ ID NO: 78 - protein, 1588 aa, Artificial Sequence
  fusion protein
MPKKKRKVEGIKSNISLLKDELRGQISHISHEYLSLIDLAFDSKQNRLFEMKVLELLVNEYGFKGRHLGGSRKPDGIVYSTTLEDNFGIIVDTKAYSEGYSLPISQADEMERYVRENSNRDEEVNPNKWWENFSEEVKKYYFVFISGSFKGKFEEQLRRLSMTTGVNGSAVNVVNLLLGAEKIRSGEMTIEELERAMFNNSEFILKYGGGGSDKKYSIGLAIGTNSVGWAVITDEYKVPSKKFKVLGNTDRHSIKKNLIGALLFDSGETAEATRLKRTARRRYTRRKNRICYLQEIFSNEMAKVDDSFFHRLEESFLVEEDKKHERHPIFGNIVDEVAYHEKYPTIYHLRKKLVDSTDKADLRLIYLALAHMIKFRGHFLIEGDLNPDNSDVDKLFIQLVQTYNQLFEENPINASGVDAKAILSARLSKSRRLENLIAQLPGEKKNGLFGNLIALSLGLTPNFKSNFDLAEDAKLQLSKDTYDDDLDNLLAQIGDQYADLFLAAKNLSDAILLSDILRVNTEITKAPLSASMIKRYDEHHQDLTLLKALVRQQLPEKYKEIFFDQSKNGYAGYIDGGASQEEFYKFIKPILEKMDGTEELLVKLNREDLLRKQRTFDNGSIPHQIHLGELHAILRRQEDFYPFLKDNREKIEKILTFRIPYYVGPLARGNSRFAWMTRKSEETITPWNFEEVVDKGASAQSFIERMTNFDKNLPNEKVLPKHSLLYEYFTVYNELTKVKYVTEGMRKPAFLSGEQKKAIVDLLFKTNRKVTVKQLKEDYFKKIECFDSVEISGVEDRFNASLGTYHDLLKIIKDKDFLDNEENEDILEDIVLTLTLFEDREMIEERLKTYAHLFDDKVMKQLKRRRYTGWGRLSRKLINGIRDKQSGKTILDFLKSDGFANRNFMQLIHDDSLTFKEDIQKAQVSGQGDSLHEHIANLAGSPAIKKGILQTVKVVDELVKVMGRHKPENIVIEMARENQTTQKGQKNSRERMKRIEEGIKELGSQILKEHPVENTQLQNEKLYLYYLQNGRDMYVDQELDINRLSDYDVDAIVPQSFLKDDSIDNKVLTRSDKNRGKSDNVPSEEVVKKMKNYWRQLLNAKLITQRKFDNLTKAERGGLSELDKAGFIKRQLVETRQITKHVAQILDSRMNTKYDENDKLIREVKVITLKSKLVSDFRKDFQFYKVREINNYHHAHDAYLNAVVGTALIKKYPKLESEFVYGDYKVYDVRKMIAKSEQEIGKATAKYFFYSNIMNFFKTEITLANGEIRKRPLIETNGETGEIVWDKGRDFATVRKVLSMPQVNIVKKTEVQTGGFSKESILPKRNSDKLIARKKDWDPKKYGGFDSPTVAYSVLVVAKVEKGKSKKLKSVKELLGITIMERSSFEKNPIDFLEAKGYKEVKKDLIIKLPKYSLFELENGRKRMLASAGELQKGNELALPSKYVNFLYLASHYEKLKGSPEDNEQKQLFVEQHKHYLDEIIEQISEFSKRVILADANLDKVLSAYNKHRDKPIREQAENIIHLFTLTNLGAPAAFKYFDTTIDRKRYTSTKEVLDATLIHQSITGLYETRIDLSQLGGDGSPKKKRKV

SEQ ID NO: 79 - DNA, 4767 bp, Artificial Sequence
  fusion polynucleotide
atgcctaagaagaagcggaaggtggaaggcatcaaaagcaacatctccctcctgaaagacgaactccgggggcagattagccacattagtcacgaatacctctccctcatcgacctggctttcgatagcaagcagaacaggctctttgagatgaaagtgctggaactgctcgtcaatgagtacgggttcaagggtcgacacctcggcggatctaggaaaccagacggcatcgtgtatagtaccacactggaagacaactttgggatcattgtggataccaaggcatactctgagggttatagtctgcccatttcacaggccgacgagatggaacggtacgtgcgcgagaactcaaatagagatgaggaagtcaaccctaacaagtggtgggagaacttctctgaggaagtgaagaaatactacttcgtctttatcagcgggtccttcaagggtaaatttgaggaacagctcaggagactgagcatgactaccggcgtgaatggcagcgccgtcaacgtggtcaatctgctcctgggcgctgaaaagattcggagcggagagatgaccatcgaagagctggagagggcaatgtttaataatagcgagtttatcctgaaatacggtggcggtggatccgataaaaagtattctattggtttagccatcggcactaattccgttggatgggctgtcataaccgatgaatacaaagtaccttcaaagaaatttaaggtgttggggaacacagaccgtcattcgattaaaaagaatcttatcggtgccctcctattcgatagtggcgaaacggcagaggcgactcgcctgaaacgaaccgctcggagaaggtatacacgtcgcaagaaccgaatatgttacttacaagaaatttttagcaatgagatggccaaagttgacgattctttctttcaccgtttggaagagtccttccttgtcgaagaggacaagaaacatgaacggcaccccatctttggaaacatagtagatgaggtggcatatcatgaaaagtacccaacgatttatcacctcagaaaaaagctagttgactcaactgataaagcggacctgaggttaatctacttggctcttgcccatatgataaagttccgtgggcactttctcattgagggtgatctaaatccggacaactcggatgtcgacaaactgttcatccagttagtacaaacctataatcagttgtttgaagagaaccctataaatgcaagtggcgtggatgcgaaggctattcttagcgcccgcctctctaaatcccgacggctagaaaacctgatcgcacaattacccggagagaagaaaaatgggttgttcggtaaccttatagcgctctcactaggcctgacaccaaattttaagtcgaacttcgacttagctgaagatgccaaattgcagcttagtaaggacacgtacgatgacgatctcgacaatctactggcacaaattggagatcagtatgcggacttatttttggctgccaaaaaccttagcgatgcaatcctcctatctgacatactgagagttaatactgagattaccaaggcgccgttatccgcttcaatgatcaaaaggtacgatgaacatcaccaagacttgacacttctcaaggccctagtccgtcagcaactgcctgagaaatataaggaaatattctttgatcagtcgaaaaacgggtacgcaggttatattgacggcggagcgagtcaagaggaattctacaagtttatcaaacccatattagagaagatggatgggacggaagagttgcttgtaaaactcaatcgcgaagatctactgcgaaagcagcggactttcgacaacggtagcattccacatcaaatccacttaggcgaattgcatgctatacttagaaggcaggaggatttttatccgttcctcaaagacaatcgtgaaaagattgagaaaatcctaacctttcgcataccttactatgtgggacccctggcccgagggaactctcggttcgcatggatgacaagaaagtccgaagaaacgattactccatggaattttgaggaagttgtcgataaaggtgcgtcagctcaatcgttcatcgagaggatgaccaactttgacaagaatttaccgaacgaaaaagtattgcctaagcacagtttactttacgagtatttcacagtgtacaatgaactcacgaaagttaagtatgtcactgagggcatgcgtaaacccgcctttctaagcggagaacagaagaaagcaatagtagatctgttattcaagaccaaccgcaaagtgacagttaagcaattgaaagaggactactttaagaaaattgaatgcttcgattctgtcgagatctccggggtagaagatcgatttaatgcgtcacttggtacgtatcatgacctcctaaagataattaaagataaggacttcctggataacgaagagaatgaagatatcttagaagatatagtgttgactcttaccctctttgaagatcgggaaatgattgaggaaagactaaaaacatacgctcacctgttcgacgataaggttatgaaacagttaaagaggcgtcgctatacgggctggggacgattgtcgcggaaacttatcaacgggataagagacaagcaaagtggtaaaactattctcgattttctaaagagcgacggcttcgccaataggaactttatgcagctgatccatgatgactctttaaccttcaaagaggatatacaaaaggcacaggtttccggacaaggggactcattgcacgaacatattgcgaatcttgctggttcgccagccatcaaaaagggcatactccagacagtcaaagtagtggatgagctagttaaggtcatgggacgtcacaaaccggaaaacattgtaatcgagatggcacgcgaaaatcaaacgactcagaaggggcaaaaaaacagtcgagagcggatgaagagaatagaagagggtattaaagaactgggcagccagatcttaaaggagcatcctgtggaaaatacccaattgcagaacgagaaactttacctctattacctacaaaatggaagggacatgtatgttgatcaggaactggacataaaccgtttatctgattacgacgtcgatgccattgtaccccaatcctttttgaaggacgattcaatcgacaataaagtgcttacacgctcggataagaaccgagggaaaagtgacaatgttccaagcgaggaagtcgtaaagaaaatgaagaactattggcggcagctcctaaatgcgaaactgataacgcaaagaaagttcgataacttaactaaagctgagaggggtggcttgtctgaacttgacaaggccggatttattaaacgtcagctcgtggaaacccgccaaatcacaaagcatgttgcacagatactagattcccgaatgaatacgaaatacgacgagaacgataagctgattcgggaagtcaaagtaatcactttaaagtcaaaattggtgtcggacttcagaaaggattttcaattctataaagttagggagataaataactaccaccatgcgcacgacgcttatcttaatgccgtcgtagggaccgcactcattaagaaatacccgaagctagaaagtgagtttgtgtatggtgattacaaagtttatgacgtccgtaagatgatcgcgaaaagcgaacaggagataggcaaggctacagccaaatacttcttttattctaacattatgaatttctttaagacggaaatcactctggcaaacggagagatacgcaaacgacctttaattgaaaccaatggggagacaggtgaaatcgtatgggataagggccgggacttcgcgacggtgagaaaagttttgtccatgccccaagtcaacatagtaaagaaaactgaggtgcagaccggagggttttcaaaggaatcgattcttccaaaaaggaatagtgataagctcatcgctcgtaaaaaggactgggacccgaaaaagtacggtggcttcgatagccctacagttgcctattctgtcctagtagtggcaaaagttgagaagggaaaatccaagaaactgaagtcagtcaaagaattattggggataacgattatggagcgctcgtcttttgaaaagaaccccatcgacttccttgaggcgaaaggttacaaggaagtaaaaaaggatctcataattaaactaccaaagtatagtctgtttgagttagaaaatggccgaaaacggatgttggctagcgccggagagcttcaaaaggggaacgaactcgcactaccgtctaaatacgtgaatttcctgtatttagcgtcccattacgagaagttgaaaggttcacctgaagataacgaacagaagcaactttttgttgagcagcacaaacattatctcgacgaaatcatagagcaaatttcggaattcagtaagagagtcatcctagctgatgccaatctggacaaagtattaagcgcatacaacaagcacagggataaacccatacgtgagcaggcggaaaatattatccatttgtttactcttaccaacctcggcgctccagccgcattcaagtattttgacacaacgatagatcgcaaacgatacacttctaccaaggaggtgctagacgcgacactgattcaccaatccatcacgggattatatgaaactcggatagatttgtcacagcttgggggtgacggatcccccaagaagaagaggaaagtctga

SEQ ID NO: 80 - protein, 431 aa, Homo Sapiens
MPNPRPGKPSAPSLALGPSPGASPSWRAAPKASDLLGARGPGGTFQGRDLRGGAHASSSSLNPMPPSQLQLPTLPLVMVAPSGARLGPLPHLQALLQDRPHFMHQLSTVDAHARTPVLQVHPLESPAMISLTPPTTATGVFSLKARPGLPPGINVASLEWVSREPALLCTFPNPSAPRKDSTLSAVPQSSYPLLANGVCKWPGCEKVFEEPEDFLKHCQADHLLDEKGRAQCLLQREMVQSLEQQLVLEKEKLSAMQAHLAGKMALTKASSVASSDKGSCCIVAAGSQGPVVPAWSGPREAPDSLFAVRRHLWGSHGNSTFPEFLHNMDYFKFHNMRPPFTYATLIRWAILEAPEKQRTLNEIYHWFTRMFAFFRNHPATWKNAIRHNLSLHKCFVRVESEKGAVWTVDELEFRKKRSQRPSRCSNPTPGP

SEQ ID NO: 81 - DNA, 1293 bp, Homo Sapiens
atgcccaaccccaggcctggcaagccctcggccccttccttggcccttggcccatccccaggagcctcgcccagctggagggctgcacccaaagcctcagacctgctgggggcccggggcccagggggaaccttccagggccgagatcttcgaggcggggcccatgcctcctcttcttccttgaaccccatgccaccatcgcagctgcagctgcccacactgcccctagtcatggtggcaccctccggggcacggctgggccccttgccccacttacaggcactcctccaggacaggccacatttcatgcaccagctctcaacggtggatgcccacgcccggacccctgtgctgcaggtgcaccccctggagagcccagccatgatcagcctcacaccacccaccaccgccactggggtcttctccctcaaggcccggcctggcctcccacctgggatcaacgtggccagcctggaatgggtgtccagggagccggcactgctctgcaccttcccaaatcccagtgcacccaggaaggacagcaccctttcggctgtgccccagagctcctacccactgctggcaaatggtgtctgcaagtggcccggatgtgagaaggtcttcgaagagccagaggacttcctcaagcactgccaggcggaccatcttctggatgagaagggcagggcacaatgtctcctccagagagagatggtacagtctctggagcagcagctggtgctggagaaggagaagctgagtgccatgcaggcccacctggctgggaaaatggcactgaccaaggcttcatctgtggcatcatccgacaagggctcctgctgcatcgtagctgctggcagccaaggccctgtcgtcccagcctggtctggcccccgggaggcccctgacagcctgtttgctgtccggaggcacctgtggggtagccatggaaacagcacattcccagagttcctccacaacatggactacttcaagttccacaacatgcgaccccctttcacctacgccacgctcatccgctgggccatcctggaggctccagagaagcagcggacactcaatgagatctaccactggttcacacgcatgtttgccttcttcagaaaccatcctgccacctggaagaacgccatccgccacaacctgagtctgcacaagtgctttgtgcgggtggagagcgagaagggggctgtgtggaccgtggatgagctggagttccgcaagaaacggagccagaggcccagcaggtgttccaaccctacacctggcccc

SEQ ID NO: 82 - protein, 220 aa, Homo Sapiens
MLRLLLALNLFPSIQVTGNKILVKQSPMLVAYDNAVNLSCKYSYNLFSREFRASLHKGLDSAVEVCVVYGNYSQQLQVYSKTGFNCDGKLGNESVTFYLQNLYVNQTDIYFCKIEVMYPPPYLDNEKSNGTIIHVKGKHLCPSPLFPGPSKPFWVLVVVGGVLACYSLLVTVAFIIFWVRSKRSRLLHSDYMNMTPRRPGPTRKHYQPYAPPRDFAAYRS

SEQ ID NO: 83 - DNA, 663 bp, Homo Sapiens
atgctcaggctgctcttggctctcaacttattcccttcaattcaagtaacaggaaacaagattttggtgaagcagtcgcccatgcttgtagcgtacgacaatgcggtcaaccttagctgcaagtattcctacaatctcttctcaagggagttccgggcatcccttcacaaaggactggatagtgctgtggaagtctgtgttgtatatgggaattactcccagcagcttcaggtttactcaaaaacggggttcaactgtgatgggaaattgggcaatgaatcagtgacattctacctccagaatttgtatgttaaccaaacagatatttacttctgcaaaattgaagttatgtatcctcctccttacctagacaatgagaagagcaatggaaccattatccatgtgaaagggaaacacctttgtccaagtcccctatttcccggaccttctaagcccttttgggtgctggtggtggttggtggagtcctggcttgctatagcttgctagtaacagtggcctttattattttctgggtgaggagtaagaggagcaggctcctgcacagtgactacatgaacatgactccccgccgccccgggcccacccgcaagcattaccagccctatgccccaccacgcgacttcgcagcctatcgctcctga

SEQ ID NO: 84 - protein, 331 aa, Artificial Sequence
  CSR CD28z
MLRLLLALNLFPSIQVTGNKILVKQSPMLVAYDNAVNLSCKYSYNLFSREFRASLHKGLDSAVEVCVVYGNYSQQLQVYSKTGFNCDGKLGNESVTFYLQNLYVNQTDIYFCKIEVMYPPPYLDNEKSNGTIIHVKGKHLCPSPLFPGPSKPFWVLWVGGVLACYSLLVTVAFIIFWVRSKRSRLLHSDYMNMTPRRPGPTRKHYQPYAPPRDFAAYRSRVKFSRSADAPAYKQGQNQLYNELNLGRREEYDVLDKRRGRDPEMGGKPRRKNPQEGLYNELQKDKMAEAYSEIGMKGERRRGKGHDGLYQGLSTATKDTYDALHMQALPPR

SEQ ID NO: 85 - protein, 18 aa, Homo sapiens
MLRLLLALNLFPSIQVTG

SEQ ID NO: 86 - protein, 134 aa, Homo sapiens
NKILVKQSPMLVAYDNAVNLSCKYSYNLFSREFRASLHKGLDSAVEVCVVYGNYSQQLQVYSKTGFNCDGKLGNESVTFYLQNLYVNQTDIYFCKIEVMYPPPYLDNEKSNGTIIHVKGKHLCPSPLFPGPSKP

SEQ ID NO: 87 - protein, 27 aa, Homo sapiens
FWVLVVVGGVLACYSLLVTVAFIIFWV

SEQ ID NO: 88 - protein, 41 aa, Homo sapiens
RSKRSRLLHSDYMNMTPRRPGPTRKHYQPYAPPRDFAAYRS

SEQ ID NO: 89 - DNA, 992 bp, Artificial Sequence
  CSR CD28z
atgctgagactgctgctggccctgaatctgttccccagcatccaagtgaccggcaacaagatcctggtcaagcagagccctatgctggtggcctacgacaacgccgtgaacctgagctgcaagtacagctacaacctgttcagcagagagttccgggccagcctgcacaaaggactggattctgctgtggaagtgtgcgtggtgtacggcaactacagccagcagctgcaggtctacagcaagaccggcttcaactgcgacggcaagctgggcaatgagagcgtgaccttctacctgcaaaacctgtacgtgaaccagaccgacatctatttctgcaagatcgaagtgatgtacccgcctccttacctggacaacgagaagtccaacggcaccatcatccacgtgaagggcaagcacctgtgtccttctccactgttccccggacctagcaagcctttctgggtgctcgttgttgttggcggcgtgctggcctgttatagcctgctggttacagtggccttcatcatcgggtccgaagcaagcggagccggctgctgcacagcgactacatgaacatgacccctagacggcccggaccaaccagaaagcactaccagccttacgctcctcctagagacttcgccgcctaccggtccagagtgaagttctccagatccgccgatgctcccgcctataagcagggccagaaccagctgtacaacgagctgaacctggggagaagagaagagtacgatgtgctggacaagcggagaggcagagatcctgagatgggcggcaagcccagacggaagaatcctcaagagggcctgtacaatgaactgcagaaagacaagatggccgaggcctacagcgagatcggaatgaagggcgagcgcagaagaggcaagggacacgatggactgtaccagggcctgagcaccgccaccaaggatacctatgatgccctgcacatgcaggccctgcctccaaga

SEQ ID NO: 90 - DNA, 54 bp, Homo sapiens
atgctgagactgctgctggccctgaatctgttccccagcatccaagtgaccggc

SEQ ID NO: 91 - DNA, 402 bp, Homo sapiens
aacaagatcctggtcaagcagagccctatgctggtggcctacgacaacgccgtgaacctgagctgcaagtacagctacaacctgttcagcagagagttccgggccagcctgcacaaaggactggattctgctgtggaagtgtgcgtggtgtacggcaactacagccagcagctgcaggtctacagcaagaccggcttcaactgcgacggcaagctgggcaatgagagcgtgaccttctacctgcaaaacctgtacgtgaaccagaccgacatctatttctgcaagatcgaagtgatgtacccgcctccttacctggacaacgagaagtccaacggcaccatcatccacgtgaagggcaagcacctgtgtccttctccactgttccccggacctagcaagcct

SEQ ID NO: 92 - DNA, 81 bp, Homo sapiens
ttctgggtgctcgttgttgttggcggcgtgctggcctgttatagcctgctggttacagtggccttcatcatcttttgggtc

SEQ ID NO: 93 - DNA, 123 bp, Homo sapiens
cgaagcaagcggagccggctgctgcacagcgactacatgaacatgacccctagacggcccggaccaaccagaaagcactaccagccttacgctcctcctagagacttcgccgcctaccggtcc

SEQ ID NO: 94 - DNA, 336 bp, Homo sapiens
agagtgaagttctccagatccgccgatgctcccgcctataagcagggccagaaccagctgtacaacgagctgaacctggggagaagagaagagtacgatgtgctggacaagcggagaggcagagatcctgagatgggcggcaagcccagacggaagaatcctcaagagggcctgtacaatgaactgcagaaagacaagatggccgaggcctacagcgagatcggaatgaagggcgagcgcagaagaggcaagggacacgatggactgtaccagggcctgagcaccgccaccaaggatacctatgatgccctgcacatgcaggccctgcctccaaga

SEQ ID NO: 95 - protein, 351 aa, Homo Sapiens
MSFPCKFVASFLLIFNVSSKGAVSKEITNALETWGALGQDINLDIPSFQMSDDIDDIKWEKTSDKKKIAQFRKEKETFKEKDTYKLFKNGTLKIKHLKTDDQDIYKVSIYDTKGKNVLEKIFDLKIQERVSKPKISWTCINTTLTCEVMNGTDPELNLYQDGKHLKLSQRVITHKWTTSLSAKFKCTAGNKVSKESSVEPVSCPEKGLDIYLIIGICGGGSLLMVFVALLVFYITKRKKQRSRRNDEELETRAHRVATEERGRKPHQIPASTPQNPATSQHPPPPPGHRSQAPSHRPPPPGHRVQHQPQKRPPAPSGTQVHQQKGPPLPRPRVQPKPPHGAAENSLSPSSN

SEQ ID NO: 96 - DNA, 1056 bp, Homo Sapiens
atgagctttccatgtaaatttgtagccagcttccttctgattttcaatgtttcttccaaaggtgcagtctccaaagagattacgaatgccttggaaacctggggtgccttgggtcaggacatcaacttggacattcctagttttcaaatgagtgatgatattgacgatataaaatgggaaaaaacttcagacaagaaaaagattgcacaattcagaaaagagaaagagactttcaaggaaaaagatacatataagctatttaaaaatggaactctgaaaattaagcatctgaagaccgatgatcaggatatctacaaggtatcaatatatgatacaaaaggaaaaaatgtgttggaaaaaatatttgatttgaagattcaagagagggtctcaaaaccaaagatctcctggacttgtatcaacacaaccctgacctgtgaggtaatgaatggaactgaccccgaattaaacctgtatcaagatgggaaacatctaaaactttctcagagggtcatcacacacaagtggaccaccagcctgagtgcaaaattcaagtgcacagcagggaacaaagtcagcaaggaatccagtgtcgagcctgtcagctgtccagagaaaggtctggacatctatctcatcattggcatatgtggaggaggcagcctcttgatggtctttgtggcactgctcgttttctatatcaccaaaaggaaaaaacagaggagtcggagaaatgatgaggagctggagacaagagcccacagagtagctactgaagaaaggggccggaagccccaccaaattccagcttcaacccctcagaatccagcaacttcccaacatcctcctccaccacctggtcatcgttcccaggcacctagtcatcgtcccccgcctcctggacaccgtgttcagcaccagcctcagaagaggcctcctgctccgtcgggcacacaagttcaccagcagaaaggcccgcccctccccagacctcgagttcagccaaaacctccccatggggcagcagaaaactcattgtccccttcctctaattaa

SEQ ID NO: 97 - protein, 463 aa, Artificial Sequence
  CSR CD2z
MSFPCKFVASFLLIFNVSSKGAVSKEITNALETWGALGQDINLDIPSFQMSDDIDDIKWEKTSDKKKIAQFRKEKETFKEKDTYKLFKNGTLKIKHLKTDDQDIYKVSIYDTKGKNVLEKIFDLKIQERVSKPKISWTCINTTLTCEVMNGTDPELNLYQDGKHLKLSQRVITHKWTTSLSAKFKCTAGNKVSKESSVEPVSCPEKGLDIYLIIGICGGGSLLMVFVALLVFYITKRKKQRSRRNDEELETRAHRVATEERGRKPHQIPASTPQNPATSQHPPPPPGHRSQAPSHRPPPPGHRVQHQPQKRPPAPSGTQVHQQKGPPLPRPRVQPKPPHGAAENSLSPSSNRVKFSRSADAPAYKQGQNQLYNELNLGRREEYDVLDKRRGRDPEMGGKPRRKNPQEGLYNELQKDKMAEAYSEIGMKGERRRGKGHDGLYQGLSTATKDTYDALHMQALPPR

SEQ ID NO: 98 - protein, 116 aa, Homo sapiens
KRKKQRSRRNDEELETRAHRVATEERGRKPHQIPASTPQNPATSQHPPPPPGHRSQAPSHRPPPPGHRVQHQPQKRPPAPSGTQVHQQKGPPLPRPRVQPKPPHGAAENSLSPSSN

SEQ ID NO: 99 - DNA, 1389 bp, Artificial Sequence
  CSR CD2z
atgagcttcccttgcaagttcgtggccagcttcctgctgatcttcaacgtgtcctctaagggcgccgtgtccaaagagatcacaaacgccctggaaacctggggagccctcggccaggatattaacctggacatccccagcttccagatgagcgacgacatcgatgacatcaagtgggagaaaaccagcgacaagaagaagatcgcccagttccggaaagagaaagagacattcaaagagaaggacacctacaagctgttcaagaacggcaccctgaagatcaagcacctgaaaaccgacgaccaggacatctataaggtgtccatctacgacaccaagggcaagaacgtgctggaaaagatcttcgacctcaagatccaagagcgggtgtccaagcctaagatcagctggacctgcatcaacaccacactgacctgcgaagtgatgaacggcacagaccccgagctgaacctgtaccaggatggcaaacacctgaagctgagccagcgcgtgatcacccacaagtggacaacaagcctgagcgccaagttcaagtgcaccgccggaaacaaagtgtctaaagagtccagcgtcgagcccgtgtcttgccctgaaaaaggactggacatctacctgatcatcggcatctgtggcggcggaagcctgctgatggtgtttgtggctctgctggtgttctacatcaccaagcggaagaagcagcggagcagacggaacgacgaggaactggaaacacgggcccatagagtggccaccgaggaaagaggcagaaagccccaccagattccagccagcacaccccagaatcctgccacctctcaacaccctccacctccacctggacacagatctcaggccccatctcacagacctccaccacctggtcatcgggtgcagcaccagcctcagaaaagacctcctgctcctagcggcacacaggtgcaccagcaaaaaggacctccactgcctcggcctagagtgcagcctaaacctcctcatggcgccgctgagaacagcctgtctccaagcagcaacagagtgaagttcagccgcagcgccgatgctcctgcctataagcagggacagaaccagctgtacaacgagctgaatctggggcgcagagaagagtacgatgtgctggacaagcggagaggcagagatcctgagatgggcggcaagcccagacggaagaatcctcaagagggcctgtataatgagctgcagaaagacaagatggccgaggcctacagcgagatcggaatgaagggcgagcgcagaagaggcaagggacacgatggactgtatcagggcctgagcaccgccaccaaggatacctatgatgccctgcacatgcaggccctgcctccaaga

SEQ ID NO: 100 - DNA, 72 bp, Homo sapiens
atgagcttcccttgcaagttcgtggccagcttcctgctgatcttcaacgtgtcctctaagggcgccgtgtcc

SEQ ID NO: 101 - DNA, 555 bp, Homo sapiens
aaagagatcacaaacgccctggaaacctggggagccctcggccaggatattaacctggacatccccagcttccagatgagcgacgacatcgatgacatcaagtgggagaaaaccagcgacaagaagaagatcgcccagttccggaaagagaaagagacattcaaagagaaggacacctacaagctgttcaagaacggcaccctgaagatcaagcacctgaaaaccgacgaccaggacatctataaggtgtccatctacgacaccaagggcaagaacgtgctggaaaagatcttcgacctcaagatccaagagcgggtgtccaagcctaagatcagctggacctgcatcaacaccacactgacctgcgaagtgatgaacggcacagaccccgagctgaacctgtaccaggatggcaaacacctgaagctgagccagcgcgtgatcacccacaagtggacaacaagcctgagcgccaagttcaagtgcaccgccggaaacaaagtgtctaaagagtccagcgtcgagcccgtgtcttgccctgaaaaaggactggac

SEQ ID NO: 102 - DNA, 78 bp, Homo sapiens
atctacctgatcatcggcatctgtggcggcggaagcctgctgatggtgtttgtggctctgctggtgttctacatcacc

SEQ ID NO: 103 - DNA, 348 bp, Homo sapiens
aagcggaagaagcagcggagcagacggaacgacgaggaactggaaacacgggcccatagagtggccaccgaggaaagaggcagaaagccccaccagattccagccagcacaccccagaatcctgccacctctcaacaccctccacctccacctggacacagatctcaggccccatctcacagacctccaccacctggtcatcgggtgcagcaccagcctcagaaaagacctcctgctcctagcggcacacaggtgcaccagcaaaaaggacctccactgcctcggcctagagtgcagcctaaacctcctcatggcgccgctgagaacagcctgtctccaagcagcaac

SEQ ID NO: 104 - protein, 463 aa, Artificial Sequence
  mutant CSR CD2z-D111H
MSFPCKFVASFLLIFNVSSKGAVSKEITNALETWGALGQDINLDIPSFQMSDDIDDIKWEKTSDKKKIAQFRKEKETFKEKDTYKLFKNGTLKIKHLKTDDQDIYKVSIYHTKGKNVLEKIFDLKIQERVSKPKISWTCINTTLTCEVMNGTDPELNLYQDGKHLKLSQRVITHKWTTSLSAKFKCTAGNKVSKESSVEPVSCPEKGLDIYLIIGICGGGSLLMVFVALLVFYITKRKKQRSRRNDEELETRAHRVATEERGRKPHQIPASTPQNPATSQHPPPPPGHRSQAPSHRPPPPGHRVQHQPQKRPPAPSGTQVHQQKGPPLPRPRVQPKPPHGAAENSLSPSSNRVKFSRSADAPAYKQGQNQLYNELNLGRREEYDVLDKRRGRDPEMGGKPRRKNPQEGLYNELQKDKMAEAYSEIGMKGERRRGKGHDGLYQGLSTATKDTYDALHMQALPPR

SEQ ID NO: 105 - DNA, 1389 bp, Artificial Sequence
  mutant CSR CD2z-D111H
atgagcttcccttgcaagttcgtggccagcttcctgctgatcttcaacgtgtcctctaagggcgccgtgtccaaagagatcacaaacgccctggaaacctggggagccctcggccaggatattaacctggacatccccagcttccagatgagcgacgacatcgatgacatcaagtgggagaaaaccagcgacaagaagaagatcgcccagttccggaaagagaaagagacattcaaagagaaggacacctacaagctgttcaagaacggcaccctgaagatcaagcacctgaaaaccgacgaccaggacatctataaggtgtccatctaccacaccaagggcaagaacgtgctggaaaagatcttcgacctcaagatccaagagcgggtgtccaagcctaagatcagctggacctgcatcaacaccacactgacctgcgaagtgatgaacggcacagaccccgagctgaacctgtaccaggatggcaaacacctgaagctgagccagcgcgtgatcacccacaagtggacaacaagcctgagcgccaagttcaagtgcaccgccggaaacaaagtgtctaaagagtccagcgtcgagcccgtgtcttgccctgaaaaaggactggacatctacctgatcatcggcatctgtggcggcggaagcctgctgatggtgtttgtggctctgctggtgttctacatcaccaagcggaagaagcagcggagcagacggaacgacgaggaactggaaacacgggcccatagagtggccaccgaggaaagaggcagaaagccccaccagattccagccagcacaccccagaatcctgccacctctcaacaccctccacctccacctggacacagatctcaggccccatctcacagacctccaccacctggtcatcgggtgcagcaccagcctcagaaaagacctcctgctcctagcggcacacaggtgcaccagcaaaaaggacctccactgcctcggcctagagtgcagcctaaacctcctcatggcgccgctgagaacagcctgtctccaagcagcaacagagtgaagttcagccgcagcgccgatgctcctgcctataagcagggacagaaccagctgtacaacgagctgaatctggggcgcagagaagagtacgatgtgctggacaagcggagaggcagagatcctgagatgggcggcaagcccagacggaagaatcctcaagagggcctgtataatgagctgcagaaagacaagatggccgaggcctacagcgagatcggaatgaagggcgagcgcagaagaggcaagggacacgatggactgtatcagggcctgagcaccgccaccaaggatacctatgatgccctgcacatgcaggccctgcctccaaga

SEQ ID NO: 106 - DNA, 555 bp, Artificial Sequence
  CD2 Extracellular domain with D111H mutation within the CD2 Extracellular domain
aaagagatcacaaacgccctggaaacctggggagccctcggccaggatattaacctggacatccccagcttccagatgagcgacgacatcgatgacatcaagtgggagaaaaccagcgacaagaagaagatcgcccagttccggaaagagaaagagacattcaaagagaaggacacctacaagctgttcaagaacggcaccctgaagatcaagcacctgaaaaccgacgaccaggacatctataaggtgtccatctaccacaccaagggcaagaacgtgctggaaaagatcttcgacctcaagatccaagagcgggtgtccaagcctaagatcagctggacctgcatcaacaccacactgacctgcgaagtgatgaacggcacagaccccgagctgaacctgtaccaggatggcaaacacctgaagctgagccagcgcgtgatcacccacaagtggacaacaagcctgagcgccaagttcaagtgcaccgccggaaacaaagtgtctaaagagtccagcgtcgagcccgtgtcttgccctgaaaaaggactggac

SEQ ID NO: 107 - protein, 463 aa, Artificial Sequence; identical to SEQ ID NO: 104
  CSR 01 CD2.DH.z

SEQ ID NO: 108 - DNA, 1389 bp, Artificial Sequence
  CSR 01 CD2.DH.z
atgagcttcccttgcaagttcgtggccagcttcctgctgatcttcaacgtgtcctctaagggcgccgtgtccaaagaaatcacgaatgcattggaaacctggggagccctcggccaggatattaacctggacatccccagcttccagatgagcgacgacatcgatgacatcaagtgggagaaaaccagcgacaagaagaagatcgcccagttccggaaagagaaagagacattcaaagagaaggacacctacaagctgttcaagaacggcaccctgaagatcaagcacctgaaaaccgacgaccaggacatctataaggtgtccatctaccacaccaagggcaagaacgtgctggaaaagatcttcgacctcaagatccaagagcgggtgtccaagcctaagatcagctggacctgcatcaacaccacactgacctgcgaagtgatgaacggcacagaccccgagctgaacctgtaccaggatggcaaacacctgaagctgagccagcgcgtgatcacccacaagtggacaacaagcctgagcgccaagttcaagtgcaccgccggaaacaaagtgtctaaagagtccagcgtcgagcccgtgtcttgccctgaaaaaggactggacatctacctgatcatcggcatctgtggcggcggatccctgctgatggtgtttgtggctctgctggtgttctacatcaccaagcggaagaagcagcggagcagacggaacgacgaggaactggaaacacgggcccatagagtggccaccgaggaaagaggcagaaagccccaccagattccagccagcacaccccagaatcctgccacctctcaacaccctccacctccacctggacacagatctcaggccccatctcacagacctccaccacctggtcatcgggtgcagcaccagcctcagaaaagacctcctgctcctagcggcacacaggtgcaccagcaaaaaggacctccactgcctcggcctagagtgcagcctaaacctcctcatggcgccgctgagaacagcctgtctccaagcagcaacagagtgaaattcagccgcagcgccgatgctcctgcctataagcagggacagaaccagctgtacaacgagctgaatctggggcgcagagaagagtacgatgtgctggacaagcggagaggcagagatcctgagatgggcggcaagcccagacggaagaatcctcaagagggcctgtataatgagctgcagaaagacaagatggccgaggcctacagcgagatcggaatgaagggcgagcgcagaagaggcaagggacacgatggactgtatcagggcctgagcaccgccaccaaggatacctatgatgccctgcacatgcaggccctgcctccaaga

SEQ ID NO: 109 - protein, 460 aa, Artificial Sequence
  CSR 01b CD2.8.DH.z
MALPVTALLLPLALLLHAARPKEITNALETWGALGQDINLDIPSFQMSDDIDDIKWEKTSDKKKIAQFRKEKETFKEKDTYKLFKNGTLKIKHLKTDDQDIYKVSIYHTKGKNVLEKIFDLKIQERVSKPKISWTCINTTLTCEVMNGTDPELNLYQDGKHLKLSQRVITHKWTTSLSAKFKCTAGNKVSKESSVEPVSCPEKGLDIYLIIGICGGGSLLMVFVALLVFYITKRKKQRSRRNDEELETRAHRVATEERGRKPHQIPASTPQNPATSQHPPPPPGHRSQAPSHRPPPPGHRVQHQPQKRPPAPSGTQVHQQKGPPLPRPRVQPKPPHGAAENSLSPSSNRVKFSRSADAPAYKQGQNQLYNELNLGRREEYDVLDKRRGRDPEMGGKPRRKNPQEGLYNELQKDKMAEAYSEIGMKGERRRGKGHDGLYQGLSTATKDTYDALHMQALPPR

SEQ ID NO: 110 - DNA, 1380 bp, Artificial Sequence
  CSR 01b CD2.8.DH.z
atggctctgcctgtgacagctctgctgctgcctctggctctgcttctgcatgccgccagacctaaagaaatcacgaatgcattggaaacctggggagccctcggccaggatattaacctggacatccccagcttccagatgagcgacgacatcgatgacatcaagtgggagaaaaccagcgacaagaagaagatcgcccagttccggaaagagaaagagacattcaaagagaaggacacctacaagctgttcaagaacggcaccctgaagatcaagcacctgaaaaccgacgaccaggacatctataaggtgtccatctaccacaccaagggcaagaacgtgctggaaaagatcttcgacctcaagatccaagagcgggtgtccaagcctaagatcagctggacctgcatcaacaccacactgacctgcgaagtgatgaacggcacagaccccgagctgaacctgtaccaggatggcaaacacctgaagctgagccagcgcgtgatcacccacaagtggacaacaagcctgagcgccaagttcaagtgcaccgccggaaacaaagtgtctaaagagtccagcgtcgagcccgtgtcttgccctgaaaaaggactggacatctacctgatcatcggcatctgtggcggcggatccctgctgatggtgtttgtggctctgctggtgttctacatcaccaagcggaagaagcagcggagcagacggaacgacgaggaactggaaacacgggcccatagagtggccaccgaggaaagaggcagaaagccccaccagattccagccagcacaccccagaatcctgccacctctcaacaccctccacctccacctggacacagatctcaggccccatctcacagacctccaccacctggtcatcgggtgcagcaccagcctcagaaaagacctcctgctcctagcggcacacaggtgcaccagcaaaaaggacctccactgcctcggcctagagtgcagcctaaacctcctcatggcgccgctgagaacagcctgtctccaagcagcaacagagtgaaattcagccgcagcgccgatgctcctgcctataagcagggacagaaccagctgtacaacgagctgaatctggggcgcagagaagagtacgatgtgctggacaagcggagaggcagagatcctgagatgggcggcaagcccagacggaagaatcctcaagagggcctgtataatgagctgcagaaagacaagatggccgaggcctacagcgagatcggaatgaagggcgagcgcagaagaggcaagggacacgatggactgtatcagggcctgagcaccgccaccaaggatacctatgatgccctgcacatgcaggccctgcctccaaga

SEQ ID NO: 111 - DNA, 63 bp, Homo sapiens
atggctctgcctgtgacagctctgctgctgcctctggctctgcttctgcatgccgccagacct

SEQ ID NO: 112 - protein, 388 aa, Artificial Sequence
  CSR 02 CD2.DH.28z
MSFPCKFVASFLLIFNVSSKGAVSKEITNALETWGALGQDINLDIPSFQMSDDIDDIKWEKTSDKKKIAQFRKEKETFKEKDTYKLFKNGTLKIKHLKTDDQDIYKVSIYHTKGKNVLEKIFDLKIQERVSKPKISWTCINTTLTCEVMNGTDPELNLYQDGKHLKLSQRVITHKWTTSLSAKFKCTAGNKVSKESSVEPVSCPEKGLDIYLIIGICGGGSLLMVFVALLVFYITRSKRSRLLHSDYMNMTPRRPGPTRKHYQPYAPPRDFAAYRSRVKFSRSADAPAYKQGQNQLYNELNLGRREEYDVLDKRRGRDPEMGGKPRRKNPQEGLYNELQKDKMAEAYSEIGMKGERRRGKGHDGLYQGLSTATKDTYDALHMQALPPR

SEQ ID NO: 113 - protein, 41 aa, Homo sapiens; identical to SEQ ID NO: 88

SEQ ID NO: 114 - DNA, 1164 bp, Artificial Sequence
  CSR 02 CD2.DH.28z
atgagcttcccttgcaagttcgtggccagcttcctgctgatcttcaacgtgtcctctaagggcgccgtgtccaaagaaatcacgaatgcattggaaacctggggagccctcggccaggatattaacctggacatccccagcttccagatgagcgacgacatcgatgacatcaagtgggagaaaaccagcgacaagaagaagatcgcccagttccggaaagagaaagagacattcaaagagaaggacacctacaagctgttcaagaacggcaccctgaagatcaagcacctgaaaaccgacgaccaggacatctataaggtgtccatctaccacaccaagggcaagaacgtgctggaaaagatcttcgacctcaagatccaagagcgggtgtccaagcctaagatcagctggacctgcatcaacaccacactgacctgcgaagtgatgaacggcacagaccccgagctgaacctgtaccaggatggcaaacacctgaagctgagccagcgcgtgatcacccacaagtggacaacaagcctgagcgccaagttcaagtgcaccgccggaaacaaagtgtctaaagagtccagcgtcgagcccgtgtcttgccctgaaaaaggactggacatctacctgatcatcggcatctgtggcggcggatccctgctgatggtgtttgtggctctgctggtgttctacatcaccagaagcaagcggagccggctgctgcacagcgactacatgaacatgacccctagacggcccggacctaccagaaagcactaccagccttacgctcctcctagagacttcgccgcctaccggtccagagtgaaattcagccgcagcgccgatgctcctgcctataagcagggacagaaccagctgtacaacgagctgaatctggggcgcagagaagagtacgatgtgctggacaagcggagaggcagagatcctgagatgggcggcaagcccagacggaagaatcctcaagagggcctgtataatgagctgcagaaagacaagatggccgaggcctacagcgagatcggaatgaagggcgagcgcagaagaggcaagggacacgatggactgtatcagggcctgagcaccgccaccaaggatacctatgatgccctgcacatgcaggccctgcctccaaga

SEQ ID NO: 115 - DNA, 123 bp, Homo sapiens
agaagcaagcggagccggctgctgcacagcgactacatgaacatgacccctagacggcccggacctaccagaaagcactaccagccttacgctcctcctagagacttcgccgcctaccggtcc

SEQ ID NO: 116 - protein, 385 aa, Artificial Sequence
  CSR 02b CD2.8.DH.28z
MALPVTALLLPLALLLHAARPKEITNALETWGALGQDINLDIPSFQMSDDIDDIKWEKTSDKKKIAQFRKEKETFKEKDTYKLFKNGTLKIKHLKTDDQDIYKVSIYHTKGKNVLEKIFDLKIQERVSKPKISWTCINTTLTCEVMNGTDPELNLYQDGKHLKLSQRVITHKWTTSLSAKFKCTAGNKVSKESSVEPVSCPEKGLDIYLIIGICGGGSLLMVFVALLVFYITRSKRSRLLHSDYMNMTPRRPGPTRKHYQPYAPPRDFAAYRSRVKFSRSADAPAYKQGQNQLYNELNLGRREEYDVLDKRRGRDPEMGGKPRRKNPQEGLYNELQKDKMAEAYSEIGMKGERRRGKGHDGLYQGLSTATKDTYDALHMQALPPR

SEQ ID NO: 117 - DNA, 1155 bp, Artificial Sequence
  CSR 02b CD2.8.DH.28z
atggctctgcctgtgacagctctgctgctgcctctggctctgcttctgcatgccgccagacctaaagaaatcacgaatgcattggaaacctggggagccctcggccaggatattaacctggacatccccagcttccagatgagcgacgacatcgatgacatcaagtgggagaaaaccagcgacaagaagaagatcgcccagttccggaaagagaaagagacattcaaagagaaggacacctacaagctgttcaagaacggcaccctgaagatcaagcacctgaaaaccgacgaccaggacatctataaggtgtccatctaccacaccaagggcaagaacgtgctggaaaagatcttcgacctcaagatccaagagcgggtgtccaagcctaagatcagctggacctgcatcaacaccacactgacctgcgaagtgatgaacggcacagaccccgagctgaacctgtaccaggatggcaaacacctgaagctgagccagcgcgtgatcacccacaagtggacaacaagcctgagcgccaagttcaagtgcaccgccggaaacaaagtgtctaaagagtccagcgtcgagcccgtgtcttgccctgaaaaaggactggacatctacctgatcatcggcatctgtggcggcggatccctgctgatggtgtttgtggctctgctggtgttctacatcaccagaagcaagcggagccggctgctgcacagcgactacatgaacatgacccctagacggcccggacctaccagaaagcactaccagccttacgctcctcctagagacttcgccgcctaccggtccagagtgaaattcagccgcagcgccgatgctcctgcctataagcagggacagaaccagctgtacaacgagctgaatctggggcgcagagaagagtacgatgtgctggacaagcggagaggcagagatcctgagatgggcggcaagcccagacggaagaatcctcaagagggcctgtataatgagctgcagaaagacaagatggccgaggcctacagcgagatcggaatgaagggcgagcgcagaagaggcaagggacacgatggactgtatcagggcctgagcaccgccaccaaggatacctatgatgccctgcacatgcaggccctgcctccaaga

SEQ ID NO: 118 - protein, 389 aa, Artificial Sequence
  CSR 03 CD2.DH.BBz
MSFPCKFVASFLLIFNVSSKGAVSKEITNALETWGALGQDINLDIPSFQMSDDIDDIKWEKTSDKKKIAQFRKEKETFKEKDTYKLFKNGTLKIKHLKTDDQDIYKVSIYHTKGKNVLEKIFDLKIQERVSKPKISWTCINTTLTCEVMNGTDPELNLYQDGKHLKLSQRVITHKWTTSLSAKFKCTAGNKVSKESSVEPVSCPEKGLDIYLIIGICGGGSLLMVFVALLVFYITKRGRKKLLYIFKQPFMRPVQTTQEEDGCSCRFPEEEEGGCELRVKFSRSADAPAYKQGQNQLYNELNLGRREEYDVLDKRRGRDPEMGGKPRRKNPQEGLYNELQKDKMAEAYSEIGMKGERRRGKGHDGLYQGLSTATKDTYDALHMQALPPR

SEQ ID NO: 119 - protein, 42 aa, Homo sapiens
KRGRKKLLYIFKQPFMRPVQTTQEEDGCSCRFPEEEEGGCEL

SEQ ID NO: 120 - DNA, 1167 bp, Artificial Sequence
  CSR 03 CD2.DH.BBz
atgagcttcccttgcaagttcgtggccagcttcctgctgatcttcaacgtgtcctctaagggcgccgtgtccaaagaaatcacgaatgcattggaaacctggggagccctcggccaggatattaacctggacatccccagcttccagatgagcgacgacatcgatgacatcaagtgggagaaaaccagcgacaagaagaagatcgcccagttccggaaagagaaagagacattcaaagagaaggacacctacaagctgttcaagaacggcaccctgaagatcaagcacctgaaaaccgacgaccaggacatctataaggtgtccatctaccacaccaagggcaagaacgtgctggaaaagatcttcgacctcaagatccaagagcgggtgtccaagcctaagatcagctggacctgcatcaacaccacactgacctgcgaagtgatgaacggcacagaccccgagctgaacctgtaccaggatggcaaacacctgaagctgagccagcgcgtgatcacccacaagtggacaacaagcctgagcgccaagttcaagtgcaccgccggaaacaaagtgtctaaagagtccagcgtcgagcccgtgtcttgccctgaaaaaggactggacatctacctgatcatcggcatctgtggcggcggatccctgctgatggtgtttgtggctctgctggtgttctacatcaccaagcggggcagaaagaagctgctgtacatcttcaagcagcccttcatgcggcccgtgcagaccacacaagaggaagatggctgctcctgcagattccccgaggaagaagaaggcggctgcgagctgagagtgaaattcagccgcagcgccgatgctcctgcctataagcagggacagaaccagctgtacaacgagctgaatctggggcgcagagaagagtacgatgtgctggacaagcggagaggcagagatcctgagatgggcggcaagcccagacggaagaatcctcaagagggcctgtataatgagctgcagaaagacaagatggccgaggcctacagcgagatcggaatgaagggcgagcgcagaagaggcaagggacacgatggactgtatcagggcctgagcaccgccaccaaggatacctatgatgccctgcacatgcaggccctgcctccaaga

SEQ ID NO: 121 - DNA, 126 bp, Homo sapiens
aagcggggcagaaagaagctgctgtacatcttcaagcagcccttcatgcggcccgtgcagaccacacaagaggaagatggctgctcctgcagattccccgaggaagaagaaggcggctgcgagctg

SEQ ID NO: 122 - protein, 386 aa, Artificial Sequence
  CSR 03b CD2.8.DH.BBz
MALPVTALLLPLALLLHAARPKEITNALETWGALGQDINLDIPSFQMSDDIDDIKWEKTSDKKKIAQFRKEKETFKEKDTYKLFKNGTLKIKHLKTDDQDIYKVSIYHTKGKNVLEKIFDLKIQERVSKPKISWTCINTTLTCEVMNGTDPELNLYQDGKHLKLSQRVITHKWTTSLSAKFKCTAGNKVSKESSVEPVSCPEKGLDIYLIIGICGGGSLLMVFVALLVFYITKRGRKKLLYIFKQPFMRPVQTTQEEDGCSCRFPEEEEGGCELRVKFSRSADAPAYKQGQNQLYNELNLGRREEYDVLDKRRGRDPEMGGKPRRKNPQEGLYNELQKDKMAEAYSEIGMKGERRRGKGHDGLYQGLSTATKDTYDALHMQALPPR

SEQ ID NO: 123 - DNA, 1158 bp, Artificial Sequence
  CSR 03b CD2.8.DH.BBz
atggctctgcctgtgacagctctgctgctgcctctggctctgcttctgcatgccgccagacctaaagaaatcacgaatgcattggaaacctggggagccctcggccaggatattaacctggacatccccagcttccagatgagcgacgacatcgatgacatcaagtgggagaaaaccagcgacaagaagaagatcgcccagttccggaaagagaaagagacattcaaagagaaggacacctacaagctgttcaagaacggcaccctgaagatcaagcacctgaaaaccgacgaccaggacatctataaggtgtccatctaccacaccaagggcaagaacgtgctggaaaagatcttcgacctcaagatccaagagcgggtgtccaagcctaagatcagctggacctgcatcaacaccacactgacctgcgaagtgatgaacggcacagaccccgagctgaacctgtaccaggatggcaaacacctgaagctgagccagcgcgtgatcacccacaagtggacaacaagcctgagcgccaagttcaagtgcaccgccggaaacaaagtgtctaaagagtccagcgtcgagcccgtgtcttgccctgaaaaaggactggacatctacctgatcatcggcatctgtggcggcggatccctgctgatggtgtttgtggctctgctggtgttctacatcaccaagcggggcagaaagaagctgctgtacatcttcaagcagcccttcatgcggcccgtgcagaccacacaagaggaagatggctgctcctgcagattccccgaggaagaagaaggcggctgcgagctgagagtgaaattcagccgcagcgccgatgctcctgcctataagcagggacagaaccagctgtacaacgagctgaatctggggcgcagagaagagtacgatgtgctggacaagcggagaggcagagatcctgagatgggcggcaagcccagacggaagaatcctcaagagggcctgtataatgagctgcagaaagacaagatggccgaggcctacagcgagatcggaatgaagggcgagcgcagaagaggcaagggacacgatggactgtatcagggcctgagcaccgccaccaaggatacctatgatgccctgcacatgcaggccctgcctccaaga

SEQ ID NO: 124 - protein, 542 aa, Artificial Sequence
  CSR 04 CD2.DH.7z
MSFPCKFVASFLLIFNVSSKGAVSKEITNALETWGALGQDINLDIPSFQMSDDIDDIKWEKTSDKKKIAQFRKEKETFKEKDTYKLFKNGTLKIKHLKTDDQDIYKVSIYHTKGKNVLEKIFDLKIQERVSKPKISWTCINTTLTCEVMNGTDPELNLYQDGKHLKLSQRVITHKWTTSLSAKFKCTAGNKVSKESSVEPVSCPEKGLDIYLIIGICGGGSLLMVFVALLVFYITKKRIKPIVWPSLPDHKKTLEHLCKKPRKNLNVSFNPESFLDCQIHRVDDIQARDEVEGFLQDTFPQQLEESEKQRLGGDVQSPNCPSEDVVITPESFGRDSSLTCLAGNVSACDAPILSSSRSLDCRESGKNGPHVYQDLLLSLGTTNSTLPPPFSLQSGILTLNPVAQGQPILTSLGSNQEEAYVTMSSFYQNQRVKFSRSADAPAYKQGQNQLYNELNLGRREEYDVLDKRRGRDPEMGGKPRRKNPQEGLYNELQKDKMAEAYSEIGMKGERRRGKGHDGLYQGLSTATKDTYDALHMQALPPR

SEQ ID NO: 125 - protein, 195 aa, Homo sapiens
KKRIKPIVWPSLPDHKKTLEHLCKKPRKNLNVSFNPESFLDCQIHRVDDIQARDEVEGFLQDTFPQQLEESEKQRLGGDVQSPNCPSEDVVITPESFGRDSSLTCLAGNVSACDAPILSSSRSLDCRESGKNGPHVYQDLLLSLGTTNSTLPPPFSLQSGILTLNPVAQGQPILTSLGSNQEEAYVTMSSFYQNQ

SEQ ID NO: 126 - DNA, 1626 bp, Artificial Sequence
  CSR 04 CD2.DH.7z
atgagcttcccttgcaagttcgtggccagcttcctgctgatcttcaacgtgtcctctaagggcgccgtgtccaaagaaatcacgaatgcattggaaacctggggagccctcggccaggatattaacctggacatccccagcttccagatgagcgacgacatcgatgacatcaagtgggagaaaaccagcgacaagaagaagatcgcccagttccggaaagagaaagagacattcaaagagaaggacacctacaagctgttcaagaacggcaccctgaagatcaagcacctgaaaaccgacgaccaggacatctataaggtgtccatctaccacaccaagggcaagaacgtgctggaaaagatcttcgacctcaagatccaagagcgggtgtccaagcctaagatcagctggacctgcatcaacaccacactgacctgcgaagtgatgaacggcacagaccccgagctgaacctgtaccaggatggcaaacacctgaagctgagccagcgcgtgatcacccacaagtggacaacaagcctgagcgccaagttcaagtgcaccgccggaaacaaagtgtctaaagagtccagcgtcgagcccgtgtcttgccctgaaaaaggactggacatctacctgatcatcggcatctgtggcggcggatccctgctgatggtgtttgtggctctgctggtgttctacatcaccaagaagcggatcaagcccatcgtgtggcccagcctgcctgaccacaagaaaaccctggaacacctgtgcaagaagccccggaagaacctgaatgtgtccttcaatcccgagagcttcctggactgccagatccacagagtggacgacatccaggccagagatgaggtggaaggctttctgcaggacacctttccacagcagctggaagagagcgagaagcagagactcggcggagatgtgcagagccctaattgccctagcgaggacgtggtcatcacccctgagagcttcggcagagatagcagcctgacatgtctggccggcaatgtgtccgcctgtgatgcccctatcctgagcagcagcagaagcctggattgcagagagagcggaaagaacggccctcatgtgtatcaggacctgctgctgagcctgggcaccaccaattctacactgcctccaccattcagcctgcagagcggcatcctgacactgaaccctgttgctcagggccagccaatcctgacaagcctgggctccaatcaagaagaggcctacgtcaccatgtccagcttctaccagaaccagagagtgaaattcagccgcagcgccgatgctcctgcctataagcagggacagaaccagctgtacaacgagctgaatctggggcgcagagaagagtacgatgtgctggacaagcggagaggcagagatcctgagatgggcggcaagcccagacggaagaatcctcaagagggcctgtataatgagctgcagaaagacaagatggccgaggcctacagcgagatcggaatgaagggcgagcgcagaagaggcaagggacacgatggactgtatcagggcctgagcaccgccaccaaggatacctatgatgccctgcacatgcaggccctgcctccaaga

SEQ ID NO: 127 - DNA, 585 bp, Homo sapiens
aagaagcggatcaagcccatcgtgtggcccagcctgcctgaccacaagaaaaccctggaacacctgtgcaagaagccccggaagaacctgaatgtgtccttcaatcccgagagcttcctggactgccagatccacagagtggacgacatccaggccagagatgaggtggaaggctttctgcaggacacctttccacagcagctggaagagagcgagaagcagagactcggcggagatgtgcagagccctaattgccctagcgaggacgtggtcatcacccctgagagcttcggcagagatagcagcctgacatgtctggccggcaatgtgtccgcctgtgatgcccctatcctgagcagcagcagaagcctggattgcagagagagcggaaagaacggccctcatgtgtatcaggacctgctgctgagcctgggcaccaccaattctacactgcctccaccattcagcctgcagagcggcatcctgacactgaaccctgttgctcagggccagccaatcctgacaagcctgggctccaatcaagaagaggcctacgtcaccatgtccagcttctaccagaaccag

SEQ ID NO: 128 - protein, 539 aa, Artificial Sequence
  CSR 04b CD2.8.DH.7z
MALPVTALLLPLALLLHAARPKEITNALETWGALGQDINLDIPSFQMSDDIDDIKWEKTSDKKKIAQFRKEKETFKEKDTYKLFKNGTLKIKHLKTDDQDIYKVSIYHTKGKNVLEKIFDLKIQERVSKPKISWTCINTTLTCEVMNGTDPELNLYQDGKHLKLSQRVITHKWTTSLSAKFKCTAGNKVSKESSVEPVSCPEKGLDIYLIIGICGGGSLLMVFVALLVFYITKKRIKPIVWPSLPDHKKTLEHLCKKPRKNLNVSFNPESFLDCQIHRVDDIQARDEVEGFLQDTFPQQLEESEKQRLGGDVQSPNCPSEDVVITPESFGRDSSLTCLAGNVSACDAPILSSSRSLDCRESGKNGPHVYQDLLLSLGTTNSTLPPPFSLQSGILTLNPVAQGQPILTSLGSNQEEAYVTMSSFYQNQRVKFSRSADAPAYKQGQNQLYNELNLGRREEYDVLDKRRGRDPEMGGKPRRKNPQEGLYNELQKDKMAEAYSEIGMKGERRRGKGHDGLYQGLSTATKDTYDALHMQALPPR

SEQ ID NO: 129 - DNA, 1617 bp, Artificial Sequence
  CSR 04b CD2.8.DH.7z
atggctctgcctgtgacagctctgctgctgcctctggctctgcttctgcatgccgccagacctaaagaaatcacgaatgcattggaaacctggggagccctcggccaggatattaacctggacatccccagcttccagatgagcgacgacatcgatgacatcaagtgggagaaaaccagcgacaagaagaagatcgcccagttccggaaagagaaagagacattcaaagagaaggacacctacaagctgttcaagaacggcaccctgaagatcaagcacctgaaaaccgacgaccaggacatctataaggtgtccatctaccacaccaagggcaagaacgtgctggaaaagatcttcgacctcaagatccaagagcgggtgtccaagcctaagatcagctggacctgcatcaacaccacactgacctgcgaagtgatgaacggcacagaccccgagctgaacctgtaccaggatggcaaacacctgaagctgagccagcgcgtgatcacccacaagtggacaacaagcctgagcgccaagttcaagtgcaccgccggaaacaaagtgtctaaagagtccagcgtcgagcccgtgtcttgccctgaaaaaggactggacatctacctgatcatcggcatctgtggcggcggatccctgctgatggtgtttgtggctctgctggtgttctacatcaccaagaagcggatcaagcccatcgtgtggcccagcctgcctgaccacaagaaaaccctggaacacctgtgcaagaagccccggaagaacctgaatgtgtccttcaatcccgagagcttcctggactgccagatccacagagtggacgacatccaggccagagatgaggtggaaggctttctgcaggacacctttccacagcagctggaagagagcgagaagcagagactcggcggagatgtgcagagccctaattgccctagcgaggacgtggtcatcacccctgagagcttcggcagagatagcagcctgacatgtctggccggcaatgtgtccgcctgtgatgcccctatcctgagcagcagcagaagcctggattgcagagagagcggaaagaacggccctcatgtgtatcaggacctgctgctgagcctgggcaccaccaattctacactgcctccaccattcagcctgcagagcggcatcctgacactgaaccctgttgctcagggccagccaatcctgacaagcctgggctccaatcaagaagaggcctacgtcaccatgtccagcttctaccagaaccagagagtgaaattcagccgcagcgccgatgctcctgcctataagcagggacagaaccagctgtacaacgagctgaatctggggcgcagagaagagtacgatgtgctggacaagcggagaggcagagatcctgagatgggcggcaagcccagacggaagaatcctcaagagggcctgtataatgagctgcagaaagacaagatggccgaggcctacagcgagatcggaatgaagggcgagcgcagaagaggcaagggacacgatggactgtatcagggcctgagcaccgccaccaaggatacctatgatgccctgcacatgcaggccctgcctccaaga

SEQ ID NO: 130 - protein, 386 aa, Artificial Sequence
  CSR 05 CD2.DH.15z
MSFPCKFVASFLLIFNVSSKGAVSKEITNALETWGALGQDINLDIPSFQMSDDIDDIKWEKTSDKKKIAQFRKEKETFKEKDTYKLFKNGTLKIKHLKTDDQDIYKVSIYHTKGKNVLEKIFDLKIQERVSKPKISWTCINTTLTCEVMNGTDPELNLYQDGKHLKLSQRVITHKWTTSLSAKFKCTAGNKVSKESSVEPVSCPEKGLDIYLIIGICGGGSLLMVFVALLVFYITKSRQTPPLASVEMEAMEALPVTWGTSSRDEDLENCSHHLRVKFSRSADAPAYKQGQNQLYNELNLGRREEYDVLDKRRGRDPEMGGKPRRKNPQEGLYNELQKDKMAEAYSEIGMKGERRRGKGHDGLYQGLSTATKDTYDALHMQALPPR

SEQ ID NO: 131 - protein, 39 aa, Homo sapiens
KSRQTPPLASVEMEAMEALPVTWGTSSRDEDLENCSHHL

SEQ ID NO: 132 - DNA, 1158 bp, Artificial Sequence
  CSR 05 CD2.DH.15z
atgagcttcccttgcaagttcgtggccagcttcctgctgatcttcaacgtgtcctctaagggcgccgtgtccaaagaaatcacgaatgcattggaaacctggggagccctcggccaggatattaacctggacatccccagcttccagatgagcgacgacatcgatgacatcaagtgggagaaaaccagcgacaagaagaagatcgcccagttccggaaagagaaagagacattcaaagagaaggacacctacaagctgttcaagaacggcaccctgaagatcaagcacctgaaaaccgacgaccaggacatctataaggtgtccatctaccacaccaagggcaagaacgtgctggaaaagatcttcgacctcaagatccaagagcgggtgtccaagcctaagatcagctggacctgcatcaacaccacactgacctgcgaagtgatgaacggcacagaccccgagctgaacctgtaccaggatggcaaacacctgaagctgagccagcgcgtgatcacccacaagtggacaacaagcctgagcgccaagttcaagtgcaccgccggaaacaaagtgtctaaagagtccagcgtcgagcccgtgtcttgccctgaaaaaggactggacatctacctgatcatcggcatctgtggcggcggatccctgctgatggtgtttgtggctctgctggtgttctacatcaccaagagccggcagacacctcctctggccagcgtggaaatggaagccatggaagctctgcctgtgacctggggcacaagcagcagagatgaggacctggaaaactgcagccaccacctgagagtgaaattcagccgcagcgccgatgctcctgcctataagcagggacagaaccagctgtacaacgagctgaatctggggcgcagagaagagtacgatgtgctggacaagcggagaggcagagatcctgagatgggcggcaagcccagacggaagaatcctcaagagggcctgtataatgagctgcagaaagacaagatggccgaggcctacagcgagatcggaatgaagggcgagcgcagaagaggcaagggacacgatggactgtatcagggcctgagcaccgccaccaaggatacctatgatgccctgcacatgcaggccctgcctccaaga

SEQ ID NO: 133 - DNA, 117 bp, Homo sapiens
aagagccggcagacacctcctctggccagcgtggaaatggaagccatggaagctctgcctgtgacctggggcacaagcagcagagatgaggacctggaaaactgcagccaccacctg

SEQ ID NO: 134 - protein, 383 aa, Artificial Sequence
  CSR 05b CD2.8.DH.15z
MALPVTALLLPLALLLHAARPKEITNALETWGALGQDINLDIPSFQMSDDIDDIKWEKTSDKKKIAQFRKEKETFKEKDTYKLFKNGTLKIKHLKTDDQDIYKVSIYHTKGKNVLEKIFDLKIQERVSKPKISWTCINTTLTCEVMNGTDPELNLYQDGKHLKLSQRVITHKWTTSLSAKFKCTAGNKVSKESSVEPVSCPEKGLDIYLIIGICGGGSLLMVFVALLVFYITKSRQTPPLASVEMEAMEALPVTWGTSSRDEDLENCSHHLRVKFSRSADAPAYKQGQNQLYNELNLGRREEYDVLDKRRGRDPEMGGKPRRKNPQEGLYNELQKDKMAEAYSEIGMKGERRRGKGHDGLYQGLSTATKDTYDALHMQALPPR

SEQ ID NO: 135 - DNA, 1149 bp, Artificial Sequence
  CSR 05b CD2.8.DH.15z
atggctctgcctgtgacagctctgctgctgcctctggctctgcttctgcatgccgccagacctaaagaaatcacgaatgcattggaaacctggggagccctcggccaggatattaacctggacatccccagcttccagatgagcgacgacatcgatgacatcaagtgggagaaaaccagcgacaagaagaagatcgcccagttccggaaagagaaagagacattcaaagagaaggacacctacaagctgttcaagaacggcaccctgaagatcaagcacctgaaaaccgacgaccaggacatctataaggtgtccatctaccacaccaagggcaagaacgtgctggaaaagatcttcgacctcaagatccaagagcgggtgtccaagcctaagatcagctggacctgcatcaacaccacactgacctgcgaagtgatgaacggcacagaccccgagctgaacctgtaccaggatggcaaacacctgaagctgagccagcgcgtgatcacccacaagtggacaacaagcctgagcgccaagttcaagtgcaccgccggaaacaaagtgtctaaagagtccagcgtcgagcccgtgtcttgccctgaaaaaggactggacatctacctgatcatcggcatctgtggcggcggatccctgctgatggtgtttgtggctctgctggtgttctacatcaccaagagccggcagacacctcctctggccagcgtggaaatggaagccatggaagctctgcctgtgacctggggcacaagcagcagagatgaggacctggaaaactgcagccaccacctgagagtgaaattcagccgcagcgccgatgctcctgcctataagcagggacagaaccagctgtacaacgagctgaatctggggcgcagagaagagtacgatgtgctggacaagcggagaggcagagatcctgagatgggcggcaagcccagacggaagaatcctcaagagggcctgtataatgagctgcagaaagacaagatggccgaggcctacagcgagatcggaatgaagggcgagcgcagaagaggcaagggacacgatggactgtatcagggcctgagcaccgccaccaaggatacctatgatgccctgcacatgcaggccctgcctccaaga

SEQ ID NO: 136 - protein, 632 aa, Artificial Sequence
  CSR 06 CD2.DH.21z
MSFPCKFVASFLLIFNVSSKGAVSKEITNALETWGALGQDINLDIPSFQMSDDIDDIKWEKTSDKKKIAQFRKEKETFKEKDTYKLFKNGTLKIKHLKTDDQDIYKVSIYHTKGKNVLEKIFDLKIQERVSKPKISWTCINTTLTCEVMNGTDPELNLYQDGKHLKLSQRVITHKWTTSLSAKFKCTAGNKVSKESSVEPVSCPEKGLDIYLIIGICGGGSLLMVFVALLVFYITSLKTHPLWRLWKKIWAVPSPERFFMPLYKGCSGDFKKWVGAPFTGSSLELGPWSPEVPSTLEVYSCHPPRSPAKRLQLTELQEPAELVESDGVPKPSFWPTAQNSGGSAYSEERDRPYGLVSIDTVTVLDAEGPCTWPCSCEDDGYPALDLDAGLEPSPGLEDPLLDAGTTVLSCGCVSAGSPGLGGPLGSLLDRLKPPLADGEDWAGGLPWGGRSPGGVSESEAGSPLAGLDMDTFDSGFVGSDCSSPVECDFTSPGDEGPPRSYLRQWVVIPPPLSSPGPQASRVKFSRSADAPAYKQGQNQLYNELNLGRREEYDVLDKRRGRDPEMGGKPRRKNPQEGLYNELQKDKMAEAYSEIGMKGERRRGKGHDGLYQGLSTATKDTYDALHMQALPPR

SEQ ID NO: 137 - protein, 285 aa, Homo sapiens
SLKTHPLWRLWKKIWAVPSPERFFMPLYKGCSGDFKKWVGAPFTGSSLELGPWSPEVPSTLEVYSCHPPRSPAKRLQLTELQEPAELVESDGVPKPSFWPTAQNSGGSAYSEERDRPYGLVSIDTVTVLDAEGPCTWPCSCEDDGYPALDLDAGLEPSPGLEDPLLDAGTTVLSCGCVSAGSPGLGGPLGSLLDRLKPPLADGEDWAGGLPWGGRSPGGVSESEAGSPLAGLDMDTFDSGFVGSDCSSPVECDFTSPGDEGPPRSYLRQWVVIPPPLSSPGPQAS

SEQ ID NO: 138 - DNA, 1896 bp, Artificial Sequence
  CSR 06 CD2.DH.21z
atgagcttcccttgcaagttcgtggccagcttcctgctgatcttcaacgtgtcctctaagggcgccgtgtccaaagaaatcacgaatgcattggaaacctggggagccctcggccaggatattaacctggacatccccagcttccagatgagcgacgacatcgatgacatcaagtgggagaaaaccagcgacaagaagaagatcgcccagttccggaaagagaaagagacattcaaagagaaggacacctacaagctgttcaagaacggcaccctgaagatcaagcacctgaaaaccgacgaccaggacatctataaggtgtccatctaccacaccaagggcaagaacgtgctggaaaagatcttcgacctcaagatccaagagcgggtgtccaagcctaagatcagctggacctgcatcaacaccacactgacctgcgaagtgatgaacggcacagaccccgagctgaacctgtaccaggatggcaaacacctgaagctgagccagcgcgtgatcacccacaagtggacaacaagcctgagcgccaagttcaagtgcaccgccggaaacaaagtgtctaaagagtccagcgtcgagcccgtgtcttgccctgaaaaaggactggacatctacctgatcatcggcatctgtggcggcggatccctgctgatggtgtttgtggctctgctggtgttctacatcaccagcctgaaaacacacccactctggcggctgtggaagaaaatctgggccgtgccatctcctgagcggttcttcatgcctctgtacaagggctgcagcggcgacttcaagaaatgggtcggagccccttttaccggcagctctctggaacttggaccttggagccctgaggtgcccagcacactggaagtgtacagctgtcaccctcctagaagccccgccaagagactgcagctgacagagctgcaagagcctgccgagctggtggaatctgatggcgtgcccaagcctagcttctggcccacagctcagaatagcggcggctctgcctacagcgaggaaagggatagaccttacggcctggtgtctatcgacaccgtgaccgtgctggatgccgagggaccttgtacatggccttgcagctgcgaggacgatggctaccctgctctggatctggacgcaggccttgagccttctccaggactggaagatcctctgctggacgccggaacaaccgtgctgtcttgtggctgtgtgtctgccggatctcctggacttggaggccctctgggaagcctgctggatagactgaaacctcctctggccgacggcgaagattgggctggtggacttccttggggcggaagatctccaggcggagtgtctgagtctgaagccggttctccactggccggcctggacatggataccttcgattctggcttcgtgggcagcgactgtagcagccctgtggaatgcgacttcacaagccctggcgacgagggcccacctagaagctatctgagacagtgggtcgtgatccctccacctctgtctagtcctggacctcaggccagcagagtgaaattcagccgcagcgccgatgctcctgcctataagcagggacagaaccagctgtacaacgagctgaatctggggcgcagagaagagtacgatgtgctggacaagcggagaggcagagatcctgagatgggcggcaagcccagacggaagaatcctcaagagggcctgtataatgagctgcagaaagacaagatggccgaggcctacagcgagatcggaatgaagggcgagcgcagaagaggcaagggacacgatggactgtatcagggcctgagcaccgccaccaaggatacctatgatgccctgcacatgcaggccctgcctccaaga

SEQ ID NO: 139 - DNA, 855 bp, Homo sapiens
agcctgaaaacacacccactctggcggctgtggaagaaaatctgggccgtgccatctcctgagcggttcttcatgcctctgtacaagggctgcagcggcgacttcaagaaatgggtcggagccccttttaccggcagctctctggaacttggaccttggagccctgaggtgcccagcacactggaagtgtacagctgtcaccctcctagaagccccgccaagagactgcagctgacagagctgcaagagcctgccgagctggtggaatctgatggcgtgcccaagcctagcttctggcccacagctcagaatagcggcggctctgcctacagcgaggaaagggatagaccttacggcctggtgtctatcgacaccgtgaccgtgctggatgccgagggaccttgtacatggccttgcagctgcgaggacgatggctaccctgctctggatctggacgcaggccttgagccttctccaggactggaagatcctctgctggacgccggaacaaccgtgctgtcttgtggctgtgtgtctgccggatctcctggacttggaggccctctgggaagcctgctggatagactgaaacctcctctggccgacggcgaagattgggctggtggacttccttggggcggaagatctccaggcggagtgtctgagtctgaagccggttctccactggccggcctggacatggataccttcgattctggcttcgtgggcagcgactgtagcagccctgtggaatgcgacttcacaagccctggcgacgagggcccacctagaagctatctgagacagtgggtcgtgatccctccacctctgtctagtcctggacctcaggccagc

SEQ ID NO: 140 - protein, 629 aa, Artificial Sequence
  CSR 06b CD2.8.DH.21z
MALPVTALLLPLALLLHAARPKEITNALETWGALGQDINLDIPSFQMSDDIDDIKWEKTSDKKKIAQFRKEKETFKEKDTYKLFKNGTLKIKHLKTDDQDIYKVSIYHTKGKNVLEKIFDLKIQERVSKPKISWTCINTTLTCEVMNGTDPELNLYQDGKHLKLSQRVITHKWTTSLSAKFKCTAGNKVSKESSVEPVSCPEKGLDIYLIIGICGGGSLLMVFVALLVFYITSLKTHPLWRLWKKIWAVPSPERFFMPLYKGCSGDFKKWVGAPFTGSSLELGPWSPEVPSTLEVYSCHPPRSPAKRLQLTELQEPAELVESDGVPKPSFWPTAQNSGGSAYSEERDRPYGLVSIDTVTVLDAEGPCTWPCSCEDDGYPALDLDAGLEPSPGLEDPLLDAGTTVLSCGCVSAGSPGLGGPLGSLLDRLKPPLADGEDWAGGLPWGGRSPGGVSESEAGSPLAGLDMDTFDSGFVGSDCSSPVECDFTSPGDEGPPRSYLRQWVVIPPPLSSPGPQASRVKFSRSADAPAYKQGQNQLYNELNLGRREEYDVLDKRRGRDPEMGGKPRRKNPQEGLYNELQKDKMAEAYSEIGMKGERRRGKGHDGLYQGLSTATKDTYDALHMQALPPR

SEQ ID NO: 141 - DNA, 1887 bp, Artificial Sequence
  CSR 06b CD2.8.DH.21z
atggctctgcctgtgacagctctgctgctgcctctggctctgcttctgcatgccgccagacctaaagaaatcacgaatgcattggaaacctggggagccctcggccaggatattaacctggacatccccagcttccagatgagcgacgacatcgatgacatcaagtgggagaaaaccagcgacaagaagaagatcgcccagttccggaaagagaaagagacattcaaagagaaggacacctacaagctgttcaagaacggcaccctgaagatcaagcacctgaaaaccgacgaccaggacatctataaggtgtccatctaccacaccaagggcaagaacgtgctggaaaagatcttcgacctcaagatccaagagcgggtgtccaagcctaagatcagctggacctgcatcaacaccacactgacctgcgaagtgatgaacggcacagaccccgagctgaacctgtaccaggatggcaaacacctgaagctgagccagcgcgtgatcacccacaagtggacaacaagcctgagcgccaagttcaagtgcaccgccggaaacaaagtgtctaaagagtccagcgtcgagcccgtgtcttgccctgaaaaaggactggacatctacctgatcatcggcatctgtggcggcggatccctgctgatggtgtttgtggctctgctggtgttctacatcaccagcctgaaaacacacccactctggcggctgtggaagaaaatctgggccgtgccatctcctgagcggttcttcatgcctctgtacaagggctgcagcggcgacttcaagaaatgggtcggagccccttttaccggcagctctctggaacttggaccttggagccctgaggtgcccagcacactggaagtgtacagctgtcaccctcctagaagccccgccaagagactgcagctgacagagctgcaagagcctgccgagctggtggaatctgatggcgtgcccaagcctagcttctggcccacagctcagaatagcggcggctctgcctacagcgaggaaagggatagaccttacggcctggtgtctatcgacaccgtgaccgtgctggatgccgagggaccttgtacatggccttgcagctgcgaggacgatggctaccctgctctggatctggacgcaggccttgagccttctccaggactggaagatcctctgctggacgccggaacaaccgtgctgtcttgtggctgtgtgtctgccggatctcctggacttggaggccctctgggaagcctgctggatagactgaaacctcctctggccgacggcgaagattgggctggtggacttccttggggcggaagatctccaggcggagtgtctgagtctgaagccggttctccactggccggcctggacatggataccttcgattctggcttcgtgggcagcgactgtagcagccctgtggaatgcgacttcacaagccctggcgacgagggcccacctagaagctatctgagacagtgggtcgtgatccctccacctctgtctagtcctggacctcaggccagcagagtgaaattcagccgcagcgccgatgctcctgcctataagcagggacagaaccagctgtacaacgagctgaatctggggcgcagagaagagtacgatgtgctggacaagcggagaggcagagatcctgagatgggcggcaagcccagacggaagaatcctcaagagggcctgtataatgagctgcagaaagacaagatggccgaggcctacagcgagatcggaatgaagggcgagcgcagaagaggcaagggacacgatggactgtatcagggcctgagcaccgccaccaaggatacctatgatgccctgcacatgcaggccctgcctccaaga

SEQ ID NO: 142 - protein, 385 aa, Artificial Sequence
  CSR 07 CD2.DH.Iz
MSFPCKFVASFLLIFNVSSKGAVSKEITNALETWGALGQDINLDIPSFQMSDDIDDIKWEKTSDKKKIAQFRKEKETFKEKDTYKLFKNGTLKIKHLKTDDQDIYKVSIYHTKGKNVLEKIFDLKIQERVSKPKISWTCINTTLTCEVMNGTDPELNLYQDGKHLKLSQRVITHKWTTSLSAKFKCTAGNKVSKESSVEPVSCPEKGLDIYLIIGICGGGSLLMVFVALLVFYITCWLTKKKYSSSVHDPNGEYMFMRAVNTAKKSRLTDVTLRVKFSRSADAPAYKQGQNQLYNELNLGRREEYDVLDKRRGRDPEMGGKPRRKNPQEGLYNELQKDKMAEAYSEIGMKGERRRGKGHDGLYQGLSTATKDTYDALHMQALPPR

SEQ ID NO: 143 - protein, 38 aa, Homo sapiens
CWLTKKKYSSSVHDPNGEYMFMRAVNTAKKSRLTDVTL

SEQ ID NO: 144 - DNA, 1155 bp, Artificial Sequence
  CSR 07 CD2.DH.Iz
atgagcttcccttgcaagttcgtggccagcttcctgctgatcttcaacgtgtcctctaagggcgccgtgtccaaagaaatcacgaatgcattggaaacctggggagccctcggccaggatattaacctggacatccccagcttccagatgagcgacgacatcgatgacatcaagtgggagaaaaccagcgacaagaagaagatcgcccagttccggaaagagaaagagacattcaaagagaaggacacctacaagctgttcaagaacggcaccctgaagatcaagcacctgaaaaccgacgaccaggacatctataaggtgtccatctaccacaccaagggcaagaacgtgctggaaaagatcttcgacctcaagatccaagagcgggtgtccaagcctaagatcagctggacctgcatcaacaccacactgacctgcgaagtgatgaacggcacagaccccgagctgaacctgtaccaggatggcaaacacctgaagctgagccagcgcgtgatcacccacaagtggacaacaagcctgagcgccaagttcaagtgcaccgccggaaacaaagtgtctaaagagtccagcgtcgagcccgtgtcttgccctgaaaaaggactggacatctacctgatcatcggcatctgtggcggcggatccctgctgatggtgtttgtggctctgctggtgttctacatcacctgttggctgaccaagaaaaagtacagcagcagcgtgcacgaccccaacggcgagtacatgttcatgagagccgtgaacaccgccaagaagtccagactgaccgacgtgaccctgagagtgaaattcagccgcagcgccgatgctcctgcctataagcagggacagaaccagctgtacaacgagctgaatctggggcgcagagaagagtacgatgtgctggacaagcggagaggcagagatcctgagatgggcggcaagcccagacggaagaatcctcaagagggcctgtataatgagctgcagaaagacaagatggccgaggcctacagcgagatcggaatgaagggcgagcgcagaagaggcaagggacacgatggactgtatcagggcctgagcaccgccaccaaggatacctatgatgccctgcacatgcaggccctgcctccaaga

SEQ ID NO: 145 - DNA, 114 bp, Homo sapiens
tgttggctgaccaagaaaaagtacagcagcagcgtgcacgaccccaacggcgagtacatgttcatgagagccgtgaacaccgccaagaagtccagactgaccgacgtgaccctg

SEQ ID NO: 146 - protein, 382 aa, Artificial Sequence
  CSR 07b CD2.8.DH.Iz
MALPVTALLLPLALLLHAARPKEITNALETWGALGQDINLDIPSFQMSDDIDDIKWEKTSDKKKIAQFRKEKETFKEKDTYKLFKNGTLKIKHLKTDDQDIYKVSIYHTKGKNVLEKIFDLKIQERVSKPKISWTCINTTLTCEVMNGTDPELNLYQDGKHLKLSQRVITHKWTTSLSAKFKCTAGNKVSKESSVEPVSCPEKGLDIYLIIGICGGGSLLMVFVALLVFYITCWLTKKKYSSSVHDPNGEYMFMRAVNTAKKSRLTDVTLRVKFSRSADAPAYKQGQNQLYNELNLGRREEYDVLDKRRGRDPEMGGKPRRKNPQEGLYNELQKDKMAEAYSEIGMKGERRRGKGHDGLYQGLSTATKDTYDALHMQALPPR

SEQ ID NO: 147 - DNA, 1146 bp, Artificial Sequence
  CSR 07b CD2.8.DH.Iz
atggctctgcctgtgacagctctgctgctgcctctggctctgcttctgcatgccgccagacctaaagaaatcacgaatgcattggaaacctggggagccctcggccaggatattaacctggacatccccagcttccagatgagcgacgacatcgatgacatcaagtgggagaaaaccagcgacaagaagaagatcgcccagttccggaaagagaaagagacattcaaagagaaggacacctacaagctgttcaagaacggcaccctgaagatcaagcacctgaaaaccgacgaccaggacatctataaggtgtccatctaccacaccaagggcaagaacgtgctggaaaagatcttcgacctcaagatccaagagcgggtgtccaagcctaagatcagctggacctgcatcaacaccacactgacctgcgaagtgatgaacggcacagaccccgagctgaacctgtaccaggatggcaaacacctgaagctgagccagcgcgtgatcacccacaagtggacaacaagcctgagcgccaagttcaagtgcaccgccggaaacaaagtgtctaaagagtccagcgtcgagcccgtgtcttgccctgaaaaaggactggacatctacctgatcatcggcatctgtggcggcggatccctgctgatggtgtttgtggctctgctggtgttctacatcacctgttggctgaccaagaaaaagtacagcagcagcgtgcacgaccccaacggcgagtacatgttcatgagagccgtgaacaccgccaagaagtccagactgaccgacgtgaccctgagagtgaaattcagccgcagcgccgatgctcctgcctataagcagggacagaaccagctgtacaacgagctgaatctggggcgcagagaagagtacgatgtgctggacaagcggagaggcagagatcctgagatgggcggcaagcccagacggaagaatcctcaagagggcctgtataatgagctgcagaaagacaagatggccgaggcctacagcgagatcggaatgaagggcgagcgcagaagaggcaagggacacgatggactgtatcagggcctgagcaccgccaccaaggatacctatgatgccctgcacatgcaggccctgcctccaaga

SEQ ID NO: 148 - protein, 395 aa, Artificial Sequence
  CSR 08 CD2.DH.27z
MSFPCKFVASFLLIFNVSSKGAVSKEITNALETWGALGQDINLDIPSFQMSDDIDDIKWEKTSDKKKIAQFRKEKETFKEKDTYKLFKNGTLKIKHLKTDDQDIYKVSIYHTKGKNVLEKIFDLKIQERVSKPKISWTCINTTLTCEVMNGTDPELNLYQDGKHLKLSQRVITHKWTTSLSAKFKCTAGNKVSKESSVEPVSCPEKGLDIYLIIGICGGGSLLMVFVALLVFYITQRRKYRSNKGESPVEPAEPCHYSCPREEEGSTIPIQEDYRKPEPACSPRVKFSRSADAPAYKQGQNQLYNELNLGRREEYDVLDKRRGRDPEMGGKPRRKNPQEGLYNELQKDKMAEAYSEIGMKGERRRGKGHDGLYQGLSTATKDTYDALHMQALPPR

SEQ ID NO: 149 - protein, 48 aa, Homo sapiens
QRRKYRSNKGESPVEPAEPCHYSCPREEEGSTIPIQEDYRKPEPACSP

SEQ ID NO: 150 - DNA, 1185 bp, Artificial Sequence
  CSR 08 CD2.DH.27z
atgagcttcccttgcaagttcgtggccagcttcctgctgatcttcaacgtgtcctctaagggcgccgtgtccaaagaaatcacgaatgcattggaaacctggggagccctcggccaggatattaacctggacatccccagcttccagatgagcgacgacatcgatgacatcaagtgggagaaaaccagcgacaagaagaagatcgcccagttccggaaagagaaagagacattcaaagagaaggacacctacaagctgttcaagaacggcaccctgaagatcaagcacctgaaaaccgacgaccaggacatctataaggtgtccatctaccacaccaagggcaagaacgtgctggaaaagatcttcgacctcaagatccaagagcgggtgtccaagcctaagatcagctggacctgcatcaacaccacactgacctgcgaagtgatgaacggcacagaccccgagctgaacctgtaccaggatggcaaacacctgaagctgagccagcgcgtgatcacccacaagtggacaacaagcctgagcgccaagttcaagtgcaccgccggaaacaaagtgtctaaagagtccagcgtcgagcccgtgtcttgccctgaaaaaggactggacatctacctgatcatcggcatctgtggcggcggatccctgctgatggtgtttgtggctctgctggtgttctacatcacccagcggcggaagtacagaagcaacaagggcgagagccccgtggaacctgccgagccttgtcactacagctgccccagagaggaagagggcagcacaatccccatccaagaggactacagaaagcccgagcctgcctgctctcccagagtgaaattcagccgcagcgccgatgctcctgcctataagcagggacagaaccagctgtacaacgagctgaatctggggcgcagagaagagtacgatgtgctggacaagcggagaggcagagatcctgagatgggcggcaagcccagacggaagaatcctcaagagggcctgtataatgagctgcagaaagacaagatggccgaggcctacagcgagatcggaatgaagggcgagcgcagaagaggcaagggacacgatggactgtatcagggcctgagcaccgccaccaaggatacctatgatgccctgcacatgcaggccctgcctccaaga

SEQ ID NO: 151 - DNA, 144 bp, Homo sapiens
cagcggcggaagtacagaagcaacaagggcgagagccccgtggaacctgccgagccttgtcactacagctgccccagagaggaagagggcagcacaatccccatccaagaggactacagaaagcccgagcctgcctgctctccc

SEQ ID NO: 152 - protein, 392 aa, Artificial Sequence
  CSR 08b CD2.8.DH.27z
MALPVTALLLPLALLLHAARPKEITNALETWGALGQDINLDIPSFQMSDDIDDIKWEKTSDKKKIAQFRKEKETFKEKDTYKLFKNGTLKIKHLKTDDQDIYKVSIYHTKGKNVLEKIFDLKIQERVSKPKISWTCINTTLTCEVMNGTDPELNLYQDGKHLKLSQRVITHKWTTSLSAKFKCTAGNKVSKESSVEPVSCPEKGLDIYLIIGICGGGSLLMVFVALLVFYITQRRKYRSNKGESPVEPAEPCHYSCPREEEGSTIPIQEDYRKPEPACSPRVKFSRSADAPAYKQGQNQLYNELNLGRREEYDVLDKRRGRDPEMGGKPRRKNPQEGLYNELQKDKMAEAYSEIGMKGERRRGKGHDGLYQGLSTATKDTYDALHMQALPPR

SEQ ID NO: 153 - DNA, 1176 bp, Artificial Sequence
  CSR 08b CD2.8.DH.27z
atggctctgcctgtgacagctctgctgctgcctctggctctgcttctgcatgccgccagacctaaagaaatcacgaatgcattggaaacctggggagccctcggccaggatattaacctggacatccccagcttccagatgagcgacgacatcgatgacatcaagtgggagaaaaccagcgacaagaagaagatcgcccagttccggaaagagaaagagacattcaaagagaaggacacctacaagctgttcaagaacggcaccctgaagatcaagcacctgaaaaccgacgaccaggacatctataaggtgtccatctaccacaccaagggcaagaacgtgctggaaaagatcttcgacctcaagatccaagagcgggtgtccaagcctaagatcagctggacctgcatcaacaccacactgacctgcgaagtgatgaacggcacagaccccgagctgaacctgtaccaggatggcaaacacctgaagctgagccagcgcgtgatcacccacaagtggacaacaagcctgagcgccaagttcaagtgcaccgccggaaacaaagtgtctaaagagtccagcgtcgagcccgtgtcttgccctgaaaaaggactggacatctacctgatcatcggcatctgtggcggcggatccctgctgatggtgtttgtggctctgctggtgttctacatcacccagcggcggaagtacagaagcaacaagggcgagagccccgtggaacctgccgagccttgtcactacagctgccccagagaggaagagggcagcacaatccccatccaagaggactacagaaagcccgagcctgcctgctctcccagagtgaaattcagccgcagcgccgatgctcctgcctataagcagggacagaaccagctgtacaacgagctgaatctggggcgcagagaagagtacgatgtgctggacaagcggagaggcagagatcctgagatgggcggcaagcccagacggaagaatcctcaagagggcctgtataatgagctgcagaaagacaagatggccgaggcctacagcgagatcggaatgaagggcgagcgcagaagaggcaagggacacgatggactgtatcagggcctgagcaccgccaccaaggatacctatgatgccctgcacatgcaggccctgcctccaaga

SEQ ID NO: 154 - protein, 389 aa, Artificial Sequence
  CSR 09 CD2.DH.Oxz
MSFPCKFVASFLLIFNVSSKGAVSKEITNALETWGALGQDINLDIPSFQMSDDIDDIKWEKTSDKKKIAQFRKEKETFKEKDTYKLFKNGTLKIKHLKTDDQDIYKVSIYHTKGKNVLEKIFDLKIQERVSKPKISWTCINTTLTCEVMNGTDPELNLYQDGKHLKLSQRVITHKWTTSLSAKFKCTAGNKVSKESSVEPVSCPEKGLDIYLIIGICGGGSLLMVFVALLVFYITALYLLRRDQRLPPDAHKPPGGGSFRTPIQEEQADAHSTLAKIRVKFSRSADAPAYKQGQNQLYNELNLGRREEYDVLDKRRGRDPEMGGKPRRKNPQEGLYNELQKDKMAEAYSEIGMKGERRRGKGHDGLYQGLSTATKDTYDALHMQALPPR

SEQ ID NO: 155 - protein, 42 aa, Homo sapiens
ALYLLRRDQRLPPDAHKPPGGGSFRTPIQEEQADAHSTLAKI

SEQ ID NO: 156 - DNA, 1167 bp, Artificial Sequence
  CSR 09 CD2.DH.Oxz
atgagcttcccttgcaagttcgtggccagcttcctgctgatcttcaacgtgtcctctaagggcgccgtgtccaaagaaatcacgaatgcattggaaacctggggagccctcggccaggatattaacctggacatccccagcttccagatgagcgacgacatcgatgacatcaagtgggagaaaaccagcgacaagaagaagatcgcccagttccggaaagagaaagagacattcaaagagaaggacacctacaagctgttcaagaacggcaccctgaagatcaagcacctgaaaaccgacgaccaggacatctataaggtgtccatctaccacaccaagggcaagaacgtgctggaaaagatcttcgacctcaagatccaagagcgggtgtccaagcctaagatcagctggacctgcatcaacaccacactgacctgcgaagtgatgaacggcacagaccccgagctgaacctgtaccaggatggcaaacacctgaagctgagccagcgcgtgatcacccacaagtggacaacaagcctgagcgccaagttcaagtgcaccgccggaaacaaagtgtctaaagagtccagcgtcgagcccgtgtcttgccctgaaaaaggactggacatctacctgatcatcggcatctgtggcggcggatccctgctgatggtgtttgtggctctgctggtgttctacatcaccgccctgtacctgctgcggcgggatcaaagattgcctcctgacgctcacaagcctccaggcggaggcagctttagaacccctatccaagaggaacaggctgacgcccacagcaccctggccaagatcagagtgaaattcagccgcagcgccgatgctcctgcctataagcagggacagaaccagctgtacaacgagctgaatctggggcgcagagaagagtacgatgtgctggacaagcggagaggcagagatcctgagatgggcggcaagcccagacggaagaatcctcaagagggcctgtataatgagctgcagaaagacaagatggccgaggcctacagcgagatcggaatgaagggcgagcgcagaagaggcaagggacacgatggactgtatcagggcctgagcaccgccaccaaggatacctatgatgccctgcacatgcaggccctgcctccaaga

SEQ ID NO: 157 - DNA, 126 bp, Homo sapiens
gccctgtacctgctgcggcgggatcaaagattgcctcctgacgctcacaagcctccaggcggaggcagctttagaacccctatccaagaggaacaggctgacgcccacagcaccctggccaagatc

SEQ ID NO: 158 - protein, 386 aa, Artificial Sequence
  CSR 09b CD2.8.DH.Oxz
MALPVTALLLPLALLLHAARPKEITNALETWGALGQDINLDIPSFQMSDDIDDIKWEKTSDKKKIAQFRKEKETFKEKDTYKLFKNGTLKIKHLKTDDQDIYKVSIYHTKGKNVLEKIFDLKIQERVSKPKISWTCINTTLTCEVMNGTDPELNLYQDGKHLKLSQRVITHKWTTSLSAKFKCTAGNKVSKESSVEPVSCPEKGLDIYLIIGICGGGSLLMVFVALLVFYITALYLLRRDQRLPPDAHKPPGGGSFRTPIQEEQADAHSTLAKIRVKFSRSADAPAYKQGQNQLYNELNLGRREEYDVLDKRRGRDPEMGGKPRRKNPQEGLYNELQKDKMAEAYSEIGMKGERRRGKGHDGLYQGLSTATKDTYDALHMQALPPR

SEQ ID NO: 159 - DNA, 1158 bp, Artificial Sequence
  CSR 09b CD2.8.DH.Oxz
atggctctgcctgtgacagctctgctgctgcctctggctctgcttctgcatgccgccagacctaaagaaatcacgaatgcattggaaacctggggagccctcggccaggatattaacctggacatccccagcttccagatgagcgacgacatcgatgacatcaagtgggagaaaaccagcgacaagaagaagatcgcccagttccggaaagagaaagagacattcaaagagaaggacacctacaagctgttcaagaacggcaccctgaagatcaagcacctgaaaaccgacgaccaggacatctataaggtgtccatctaccacaccaagggcaagaacgtgctggaaaagatcttcgacctcaagatccaagagcgggtgtccaagcctaagatcagctggacctgcatcaacaccacactgacctgcgaagtgatgaacggcacagaccccgagctgaacctgtaccaggatggcaaacacctgaagctgagccagcgcgtgatcacccacaagtggacaacaagcctgagcgccaagttcaagtgcaccgccggaaacaaagtgtctaaagagtccagcgtcgagcccgtgtcttgccctgaaaaaggactggacatctacctgatcatcggcatctgtggcggcggatccctgctgatggtgtttgtggctctgctggtgttctacatcaccgccctgtacctgctgcggcgggatcaaagattgcctcctgacgctcacaagcctccaggcggaggcagctttagaacccctatccaagaggaacaggctgacgcccacagcaccctggccaagatcagagtgaaattcagccgcagcgccgatgctcctgcctataagcagggacagaaccagctgtacaacgagctgaatctggggcgcagagaagagtacgatgtgctggacaagcggagaggcagagatcctgagatgggcggcaagcccagacggaagaatcctcaagagggcctgtataatgagctgcagaaagacaagatggccgaggcctacagcgagatcggaatgaagggcgagcgcagaagaggcaagggacacgatggactgtatcagggcctgagcaccgccaccaaggatacctatgatgccctgcacatgcaggccctgcctccaaga

SEQ ID NO: 160 - protein, 405 aa, Artificial Sequence
  CSR 10 CD2.DH.Gz
MSFPCKFVASFLLIFNVSSKGAVSKEITNALETWGALGQDINLDIPSFQMSDDIDDIKWEKTSDKKKIAQFRKEKETFKEKDTYKLFKNGTLKIKHLKTDDQDIYKVSIYHTKGKNVLEKIFDLKIQERVSKPKISWTCINTTLTCEVMNGTDPELNLYQDGKHLKLSQRVITHKWTTSLSAKFKCTAGNKVSKESSVEPVSCPEKGLDIYLIIGICGGGSLLMVFVALLVFYITQLGLHIWQLRSQCMWPRETQLLLEVPPSTEDARSCQFPEEERGERSAEEKGRLGDLWVRVKFSRSADAPAYKQGQNQLYNELNLGRREEYDVLDKRRGRDPEMGGKPRRKNPQEGLYNELQKDKMAEAYSEIGMKGERRRGKGHDGLYQGLSTATKDTYDALHMQALPPR

SEQ ID NO: 161 - protein, 58 aa, Homo sapiens
QLGLHIWQLRSQCMWPRETQLLLEVPPSTEDARSCQFPEEERGERSAEEKGRLGDLWV

SEQ ID NO: 162 - DNA, 1215 bp, Artificial Sequence
  CSR 10 CD2.DH.Gz
atgagcttcccttgcaagttcgtggccagcttcctgctgatcttcaacgtgtcctctaagggcgccgtgtccaaagaaatcacgaatgcattggaaacctggggagccctcggccaggatattaacctggacatccccagcttccagatgagcgacgacatcgatgacatcaagtgggagaaaaccagcgacaagaagaagatcgcccagttccggaaagagaaagagacattcaaagagaaggacacctacaagctgttcaagaacggcaccctgaagatcaagcacctgaaaaccgacgaccaggacatctataaggtgtccatctaccacaccaagggcaagaacgtgctggaaaagatcttcgacctcaagatccaagagcgggtgtccaagcctaagatcagctggacctgcatcaacaccacactgacctgcgaagtgatgaacggcacagaccccgagctgaacctgtaccaggatggcaaacacctgaagctgagccagcgcgtgatcacccacaagtggacaacaagcctgagcgccaagttcaagtgcaccgccggaaacaaagtgtctaaagagtccagcgtcgagcccgtgtcttgccctgaaaaaggactggacatctacctgatcatcggcatctgtggcggcggatccctgctgatggtgtttgtggctctgctggtgttctacatcacacagctgggactgcacatctggcagctgagaagccagtgcatgtggcccagagagacacagctgctgctggaagtgcctcctagcaccgaggatgccagaagctgtcagttccccgaggaagagagaggcgagagatccgccgaggaaaaaggcagactgggcgacctgtgggtccgagtgaaattcagccgcagcgccgatgctcctgcctataagcagggacagaaccagctgtacaacgagctgaatctggggcgcagagaagagtacgatgtgctggacaagcggagaggcagagatcctgagatgggcggcaagcccagacggaagaatcctcaagagggcctgtataatgagctgcagaaagacaagatggccgaggcctacagcgagatcggaatgaagggcgagcgcagaagaggcaagggacacgatggactgtatcagggcctgagcaccgccaccaaggatacctatgatgccctgcacatgcaggccctgcctccaaga

SEQ ID NO: 163 - DNA, 180 bp, Homo sapiens
cagctgggactgcacatctggcagctgagaagccagtgcatgtggcccagagagacacagctgctgctggaagtgcctcctagcaccgaggatgccagaagctgtcagttccccgaggaagagagaggcgagagatccgccgaggaaaaaggcagactgggcgacctgtgggtccgagtg

SEQ ID NO: 164 - protein, 402 aa, Artificial Sequence
  CSR 10b CD2.8.DH.Gz
MALPVTALLLPLALLLHAARPKEITNALETWGALGQDINLDIPSFQMSDDIDDIKWEKTSDKKKIAQFRKEKETFKEKDTYKLFKNGTLKIKHLKTDDQDIYKVSIYHTKGKNVLEKIFDLKIQERVSKPKISWTCINTTLTCEVMNGTDPELNLYQDGKHLKLSQRVITHKWTTSLSAKFKCTAGNKVSKESSVEPVSCPEKGLDIYLIIGICGGGSLLMVFVALLVFYITQLGLHIWQLRSQCMWPRETQLLLEVPPSTEDARSCQFPEEERGERSAEEKGRLGDLWVRVKFSRSADAPAYKQGQNQLYNELNLGRREEYDVLDKRRGRDPEMGGKPRRKNPQEGLYNELQKDKMAEAYSEIGMKGERRRGKGHDGLYQGLSTATKDTYDALHMQALPPR

SEQ ID NO: 165 - DNA, 1206 bp, Artificial Sequence
  CSR 10b CD2.8.DH.Gz
atggctctgcctgtgacagctctgctgctgcctctggctctgcttctgcatgccgccagacctaaagaaatcacgaatgcattggaaacctggggagccctcggccaggatattaacctggacatccccagcttccagatgagcgacgacatcgatgacatcaagtgggagaaaaccagcgacaagaagaagatcgcccagttccggaaagagaaagagacattcaaagagaaggacacctacaagctgttcaagaacggcaccctgaagatcaagcacctgaaaaccgacgaccaggacatctataaggtgtccatctaccacaccaagggcaagaacgtgctggaaaagatcttcgacctcaagatccaagagcgggtgtccaagcctaagatcagctggacctgcatcaacaccacactgacctgcgaagtgatgaacggcacagaccccgagctgaacctgtaccaggatggcaaacacctgaagctgagccagcgcgtgatcacccacaagtggacaacaagcctgagcgccaagttcaagtgcaccgccggaaacaaagtgtctaaagagtccagcgtcgagcccgtgtcttgccctgaaaaaggactggacatctacctgatcatcggcatctgtggcggcggatccctgctgatggtgtttgtggctctgctggtgttctacatcacacagctgggactgcacatctggcagctgagaagccagtgcatgtggcccagagagacacagctgctgctggaagtgcctcctagcaccgaggatgccagaagctgtcagttccccgaggaagagagaggcgagagatccgccgaggaaaaaggcagactgggcgacctgtgggtccgagtgaaattcagccgcagcgccgatgctcctgcctataagcagggacagaaccagctgtacaacgagctgaatctggggcgcagagaagagtacgatgtgctggacaagcggagaggcagagatcctgagatgggcggcaagcccagacggaagaatcctcaagagggcctgtataatgagctgcagaaagacaagatggccgaggcctacagcgagatcggaatgaagggcgagcgcagaagaggcaagggacacgatggactgtatcagggcctgagcaccgccaccaaggatacctatgatgccctgcacatgcaggccctgcctccaaga

SEQ ID NO: 166 - protein, 551 aa, Homo Sapiens
MAAPALSWRLPLLILLLPLATSWASAAVNGTSQFTCFYNSRANISCVWSQDGALQDTSCQVHAWPDRRRWNQTCELLPVSQASWACNLILGAPDSQKLTTVDIVTLRVLCREGVRWRVMAIQDFKPFENLRLMAPISLQVVHVETHRCNISWEISQASHYFERHLEFEARTLSPGHTWEEAPLLTLKQKQEWICLETLTPDTQYEFQVRVKPLQGEFTTWSPWSQPLAFRTKPAALGKDTIPWLGHLLVGLSGAFGFIILVYLLINCRNTGPWLKKVLKCNTPDPSKFFSQLSSEHGGDVQKWLSSPFPSSSFSPGGLAPEISPLEVLERDKVTQLLLQQDKVPEPASLSSNHSLTSCFTNQGYFFFHLPDALEIEACQVYFTYDPYSEEDPDEGVAGAPTGSSPQPLQPLSGEDDAYCTFPSRDDLLLFSPSLLGGPSPPSTAPGGSGAGEERMPPSLQERVPRDWDPQPLGPPTPGVPDLVDFQPPPELVLREAGEEVPDAGPREGVSFPWSRPPGQGEFRALNARLPLNTDAYLSLQELQGQDPTHLV

SEQ ID NO: 167 - DNA, 1653 bp, Homo Sapiens
atggctgcccctgctctgtcttggagactgcctctgctgatcctgctgctgcctctggctacatcttgggcctctgccgccgtgaatggcaccagccagttcacctgtttctacaacagccgggccaacatcagctgcgtgtggtcacaagatggcgccctgcaggataccagctgtcaggttcacgcctggcctgatcggagaagatggaaccagacatgcgagctgctgcccgtgtctcaggctagctgggcctgtaatctgatcctgggagcccctgacagccagaaactgaccacagtggacatcgtgaccctgcgggtgctgtgtagagaaggcgttcgttggagagtgatggccattcaggacttcaagcccttcgagaacctgcggctgatggccccaattagcctgcaggttgtgcacgtggaaacccaccggtgcaatatcagctgggagatcagccaggccagccactacttcgagcggcacctggaattcgaggccagaacactgagccctggccacacctgggaagaagctcctctgctcaccctgaagcagaaacaagagtggatctgcctggaaaccctgacacctgacacacagtacgagttccaagtgcgcgtgaagcctctccagggcgagtttacaacatggtccccttggagtcagcccctggcctttagaacaaagcctgccgctctgggcaaagacacaatcccttggctgggccatctgctcgttggactgtctggcgccttcggcttcatcatcctggtgtacctgctgatcaactgccggaacacaggcccctggctgaagaaagtgctgaagtgcaacacccctgatccgagcaagttctttagccagctgagcagcgagcatggcggcgacgttcagaaatggctgtctagcccatttcctagcagcagcttcagccctggtggactggcccctgagattagccctctggaagtgctggaacgggacaaagtgacccagctgcttctgcagcaggacaaggtgccagaacctgccagcctgtccagcaatcacagcctgaccagctgttttacaaaccagggctacttcttcttccatctgcctgacgcactggaaattgaggcctgccaggtgtacttcacctacgatccctacagcgaagaggaccccgatgaaggtgttgccggtgctcctaccggaagctctcctcaacctctgcaaccactgagcggcgaggatgacgcctactgcacattccccagcagagatgacctgctcctgttcagcccttctctgctcggcggaccttctccaccatctacagctccaggtggaagcggagccggcgaggaaagaatgcctccaagcctgcaagagcgggtgcccagagattgggatcctcaaccactgggccctccaacacctggcgtgccagatctcgtggatttccagcctcctccagagctggtgctgagagaagctggcgaagaagtgccagacgctggccctagagagggcgttagctttccttggagcagacctcctggacagggcgaattcagagccctgaatgccagactgcccctgaacaccgatgcctacctgtctctgcaagaactgcagggacaagaccccacacacctggtg

SEQ ID NO: 168 - protein, 369 aa, Homo Sapiens
MLKPSLPFTSLLFLQLPLLGVGLNTTILTPNGNEDTTADFFLTTMPTDSLSVSTLPLPEVQCFVFNVEYMNCTWNSSSEPQPTNLTLHYWYKNSDNDKVQKCSHYLFSEEITSGCQLQKKEIHLYQTFVVQLQDPREPRRQATQMLKLQNLVIPWAPENLTLHKLSESQLELNWNNRFLNHCLEHLVQYRTDWDHSWTEQSVDYRHKFSLPSVDGQKRYTFRVRSRFNPLCGSAQHWSEWSHPIHWGSNTSKENPFLFALEAVVISVGSMGLIISLLCVYFWLERTMPRIPTLKNLEDLVTEYHGNFSAWSGVSKGLAESLQPDYSERLCLVSEIPPKGGALGEGPGASPCNQHSPYWAPPCYTLKPET

SEQ ID NO: 169 - DNA, 1107 bp, Homo Sapiens
atgctgaagcccagcctgccttttaccagcctgctgttcctgcagctgcctctgcttggcgtgggcctgaataccaccatcctgacacctaacggcaacgaggatacaaccgccgacttcttcctgaccaccatgcctaccgatagcctgagcgtgtccacactgccactgcctgaggtgcagtgcttcgtgttcaacgtcgagtacatgaactgcacctggaacagctccagcgagccccagcctaccaatctgacactgcactactggtacaagaacagcgacaacgacaaggtgcagaagtgcagccactacctgttcagcgaggaaatcaccagcggctgccagctgcagaagaaagagatccacctgtaccagaccttcgtggtgcagctccaggatcctagagagcctagaaggcaggccacacagatgctgaaactgcagaacctggtcatcccctgggctcccgaaaacctgactctgcacaagctgagcgagagccagctggaactgaactggaacaaccggttcctgaatcactgcctggaacacctggtgcagtaccggaccgattgggatcacagctggacagagcagagcgtggactaccggcacaagttcagcctgccatctgtggacggccagaagcggtacacctttagagtgcggagccggttcaatcccctgtgtggatctgctcagcattggagcgagtggtcacaccctatccactggggcagcaacaccagcaaagagaaccccttcctgttcgccctggaagccgtggttatcagcgtgggctctatgggcctgatcatctccctgctgtgcgtgtacttctggctggaaagaaccatgcctcggatccccacactgaagaatctggaagatctggtcaccgagtaccacggcaacttcagtgcttggagcggcgtgtcaaaaggcctggccgaatctctgcagcccgactactctgagagactgtgcctggtgtctgagatccctcctaaaggcggagccctcggagaaggacctggcgcctctccatgtaatcagcacagcccttattgggcccctccttgctacaccctgaagcctgagaca

SEQ ID NO: 170 - DNA, 1575 bp, Artificial Sequence
  CSR 2DH.TF2z
atgagcttcccttgcaagttcgtggccagcttcctgctgatcttcaacgtgtcctctaagggcgccgtgtccaaagagatcacaaacgccctggaaacctggggagccctcggccaggatattaacctggacatccccagcttccagatgagcgacgacatcgatgacatcaagtgggagaaaaccagcgacaagaagaagatcgcccagttccggaaagagaaagagacattcaaagagaaggacacctacaagctgttcaagaacggcaccctgaagatcaagcacctgaaaaccgacgaccaggacatctataaggtgtccatctaccacaccaagggcaagaacgtgctggaaaagatcttcgacctcaagatccaagagcgggtgtccaagcctaagatcagctggacctgcatcaacaccacactgacctgcgaagtgatgaacggcacagaccccgagctgaacctgtaccaggatggcaaacacctgaagctgagccagcgcgtgatcacccacaagtggacaacaagcctgagcgccaagttcaagtgcaccgccggaaacaaagtgtctaaagagtccagcgtcgagcccgtgtcttgccctgagaaaggcctggattttgccctgcctgtgggcctgattgtgggagtgacagctctgggactgctgatcatcggcgtggtcaactgcgtgatcatgacccaagtgaagaaaaagcccctgtgcctgcagcgcgaggccaaagttcctcatctgcctgccgataaggccagaggcacacagggacctgaacagcagcatctgctgattacagcccctagcagcagcagctccagcctggaatcttctgccagcgctctggatcggagagcccctaccagaaatcagcctcaggctcctggcgtggaagctagcggagctggcgaagctagagcctctacaggcagcagcgattcttctcctggcggccacggcacacaagtgaacgtgacctgtatcgtgaacgtgtgctccagcagcgaccacagcagccagtgtagctctcaggccagcagcaccatgggcgatacagatagcagccctagcgagagccccaaggatgaacaggtgcccttcagcaaagaggaatgcgccttcagaagccagctggaaacccctgagacactgctgggcagcaccgaggaaaaacctctgcctctgggagtgcccgacgccggaatgaagcctagcagagtgaagttcagccgcagcgccgatgctcctgcctataagcagggacagaaccagctgtacaacgagctgaatctggggcgcagagaagagtacgatgtgctggacaagcggagaggcagggatcctgagatgggcggcaagcccagacggaagaatcctcaagagggcctgtataatgagctgcagaaagacaagatggccgaggcctacagcgagatcggcatgaagggcgagcgcagaagaggcaagggacacgatggactgtatcagggcctgagcaccgccaccaaggatacctatgatgccctgcacatgcaggccctgcctccaaga

SEQ ID NO: 171 - DNA, 1563 bp, Artificial Sequence
  CSR 2DH.2TF2z
atgagcttcccttgcaagttcgtggccagcttcctgctgatcttcaacgtgtcctctaagggcgccgtgtccaaagagatcacaaacgccctggaaacctggggagccctcggccaggatattaacctggacatccccagcttccagatgagcgacgacatcgatgacatcaagtgggagaaaaccagcgacaagaagaagatcgcccagttccggaaagagaaagagacattcaaagagaaggacacctacaagctgttcaagaacggcaccctgaagatcaagcacctgaaaaccgacgaccaggacatctataaggtgtccatctaccacaccaagggcaagaacgtgctggaaaagatcttcgacctcaagatccaagagcgggtgtccaagcctaagatcagctggacctgcatcaacaccacactgacctgcgaagtgatgaacggcacagaccccgagctgaacctgtaccaggatggcaaacacctgaagctgagccagcgcgtgatcacccacaagtggacaacaagcctgagcgccaagttcaagtgcaccgccggaaacaaagtgtctaaagagtccagcgtcgagcccgtgtcttgccctgaaaaaggactggacatctacctgatcatcggcatctgtggcggcggaagcctgctgatggtgtttgtggctctgctggtgttctacatcaccaagaaaaagcccctgtgcctgcagcgcgaggccaaagttcctcatctgcctgccgataaggccagaggcacacagggacctgaacagcagcatctgctgatcacagcccctagcagcagcagctctagcctggaatctagcgccagcgctctggatagaagggcccctaccagaaaccagcctcaggctcctggtgttgaagctagcggagctggcgaagccagagcctctacaggcagcagcgattcttctcctggcggccacggcacccaagtgaacgtgacctgtatcgtgaacgtgtgcagctccagcgaccacagcagccagtgtagctctcaggccagcagcaccatgggcgatacagatagcagccctagcgagagccccaaggatgaacaggtgcccttcagcaaagaggaatgcgccttcagaagccagctggaaacccctgagacactgctgggcagcaccgaggaaaaacctctgcctctgggagtgcccgacgccggaatgaagcctagcagagtgaagttcagccgcagcgccgatgctcctgcctataagcagggacagaaccagctgtacaacgagctgaatctggggcgcagagaagagtacgatgtgctggacaagcggagaggcagggatcctgagatgggcggcaagcccagacggaagaatcctcaagagggcctgtataatgagctgcagaaagacaagatggccgaggcctacagcgagatcggcatgaagggcgagcgcagaagaggcaagggacacgatggactgtatcagggcctgagcaccgccaccaaggatacctatgatgccctgcacatgcaggccctgcctccaaga

SEQ ID NO: 172 - DNA, 1566 bp, Artificial Sequence
  CSR 82DH.TF2z
atggctctgcctgtgacagctctgctgctgcctctggctctgcttctgcatgccgccagacctaaagagatcacaaacgccctggaaacctggggagccctcggccaggatattaacctggacatccccagcttccagatgagcgacgacatcgatgacatcaagtgggagaaaaccagcgacaagaagaagatcgcccagttccggaaagagaaagagacattcaaagagaaggacacctacaagctgttcaagaacggcaccctgaagatcaagcacctgaaaaccgacgaccaggacatctataaggtgtccatctaccacaccaagggcaagaacgtgctggaaaagatcttcgacctcaagatccaagagcgggtgtccaagcctaagatcagctggacctgcatcaacaccacactgacctgcgaagtgatgaacggcacagaccccgagctgaacctgtaccaggatggcaaacacctgaagctgagccagcgcgtgatcacccacaagtggacaacaagcctgagcgccaagttcaagtgcaccgccggaaacaaagtgtccaaagaaagcagcgtggaacccgtgtcttgccccgagaaaggcctggattttgccctgcctgtgggcctgattgtgggagtgactgctctgggcctgctgatcatcggcgtggtcaactgcgtgatcatgacccaagtgaagaaaaagcccctgtgcctgcagcgcgaggccaaagttcctcatctgcctgccgataaggccaggggaacacagggacctgaacagcagcatctgctgattacagcccctagcagcagctccagcagcctggaatcttctgccagcgctctggatcggagagcccctaccagaaatcagcctcaggctcctggcgtggaagctagcggagctggcgaagctagagcctctacaggcagctctgatagctctcctggcggccacggcacacaagtgaacgtgacctgtatcgtgaacgtgtgcagctcctccgaccacagcagccagtgtagctctcaggccagcagcaccatgggcgatacagatagcagccctagcgagagccccaaggatgaacaggtgcccttcagcaaagaggaatgcgccttcagaagccagctggaaacccctgagacactgctgggcagcaccgaggaaaaacctctgccactgggagtgcccgacgccggaatgaagcctagcagagtgaagttcagcagaagcgccgacgctcccgcctataagcagggacagaaccagctgtacaacgagctgaatctggggcgcagagaagagtacgatgtgctggacaagcggagaggcagagatcctgagatgggcggcaagcccagacggaagaatcctcaagagggcctgtataatgagctgcagaaagacaagatggccgaggcctacagcgagatcggcatgaagggcgagcgcagaagaggcaagggacacgatggactgtatcagggcctgagcaccgccaccaaggatacctatgatgccctgcacatgcaggccctgcctccaaga

SEQ ID NO: 173 - DNA, 1554 bp, Artificial Sequence
  CSR 82DH.2TF2z
atggctctgcctgtgacagctctgctgctgcctctggctctgcttctgcatgccgccagacctaaagagatcacaaacgccctggaaacctggggagccctcggccaggatattaacctggacatccccagcttccagatgagcgacgacatcgatgacatcaagtgggagaaaaccagcgacaagaagaagatcgcccagttccggaaagagaaagagacattcaaagagaaggacacctacaagctgttcaagaacggcaccctgaagatcaagcacctgaaaaccgacgaccaggacatctataaggtgtccatctaccacaccaagggcaagaacgtgctggaaaagatcttcgacctcaagatccaagagcgggtgtccaagcctaagatcagctggacctgcatcaacaccacactgacctgcgaagtgatgaacggcacagaccccgagctgaacctgtaccaggatggcaaacacctgaagctgagccagcgcgtgatcacccacaagtggacaacaagcctgagcgccaagttcaagtgcaccgccggaaacaaagtgtccaaagaaagcagcgtggaacccgtgtcttgccccgagaaaggactggacatctacctgatcatcggcatctgtggcggcggaagcctgctgatggtgtttgttgccctgctggtgttctacatcaccaagaaaaagcccctgtgcctgcagcgcgaggccaaagttcctcatctgcctgccgataaggccaggggaacacagggacctgaacagcagcatctgctgatcacagcccctagcagcagctccagcagcctggaatcttctgccagcgctctggatcggagagcccctaccagaaatcagcctcaggctcctggcgtggaagctagcggagctggcgaagctagagcctctacaggcagctctgatagctctcctggcggccacggcacccaagtgaatgtgacctgtatcgtgaacgtgtgcagctcctccgaccacagcagccagtgtagctctcaggccagcagcaccatgggcgatacagatagcagccctagcgagagccccaaggatgaacaggtgcccttcagcaaagaggaatgcgccttcagaagccagctggaaacccctgagacactgctgggcagcaccgaggaaaaacctctgccactgggagtgcccgacgccggaatgaagcctagcagagtgaagttcagcagaagcgccgacgctcccgcctataagcagggacagaaccagctgtacaacgagctgaatctggggcgcagagaagagtacgatgtgctggacaagcggagaggcagagatcctgagatgggcggcaagcccagacggaagaatcctcaagagggcctgtataatgagctgcagaaagacaagatggccgaggcctacagcgagatcggcatgaagggcgagcgcagaagaggcaagggacacgatggactgtatcagggcctgagcaccgccaccaaggatacctatgatgccctgcacatgcaggccctgcctccaaga

SEQ ID NO: 174 - DNA, 1989 bp, Artificial Sequence
  CSR BBBz
atggctgcccctgctctgtcttggagactgcctctgctgatcctgctgctgcctctggctacatcttgggcctctgccgccgtgaatggcaccagccagttcacctgtttctacaacagccgggccaacatcagctgcgtgtggtcacaagatggcgccctgcaggataccagctgtcaggttcacgcctggcctgatcggagaagatggaaccagacatgcgagctgctgcccgtgtctcaggctagctgggcctgtaatctgatcctgggagcccctgacagccagaaactgaccacagtggacatcgtgaccctgcgggtgctgtgtagagaaggcgttcgttggagagtgatggccattcaggacttcaagcccttcgagaacctgcggctgatggccccaattagcctgcaggttgtgcacgtggaaacccaccggtgcaatatcagctgggagatcagccaggccagccactacttcgagcggcacctggaattcgaggccagaacactgagccctggccacacctgggaagaagctcctctgctcaccctgaagcagaaacaagagtggatctgcctggaaaccctgacacctgacacacagtacgagttccaagtgcgcgtgaagcctctccagggcgagtttacaacatggtccccttggagtcagcccctggcctttagaacaaagcctgccgctctgggcaaagacacaatcccttggctgggccatctgctcgttggactgtctggcgccttcggcttcatcatcctggtgtacctgctgatcaactgccggaacacaggcccctggctgaagaaagtgctgaagtgcaacacccctgatccgagcaagttctttagccagctgagcagcgagcatggcggcgacgttcagaaatggctgtctagcccatttcctagcagcagcttcagccctggtggactggcccctgagattagccctctggaagtgctggaacgggacaaagtgacccagctgcttctgcagcaggacaaggtgccagaacctgccagcctgtccagcaatcacagcctgaccagctgttttacaaaccagggctacttcttcttccatctgcctgacgcactggaaattgaggcctgccaggtgtacttcacctacgatccctacagcgaagaggaccccgatgaaggtgttgccggtgctcctaccggaagctctcctcaacctctgcaaccactgagcggcgaggatgacgcctactgcacattccccagcagagatgacctgctcctgttcagcccttctctgctcggcggaccttctccaccatctacagctccaggtggaagcggagccggcgaggaaagaatgcctccaagcctgcaagagcgggtgcccagagattgggatcctcaaccactgggccctccaacacctggcgtgccagatctcgtggatttccagcctcctccagagctggtgctgagagaagctggcgaagaagtgccagacgctggccctagagagggcgttagctttccttggagcagacctcctggacagggcgaattcagagccctgaatgccagactgcccctgaacaccgatgcctacctgtctctgcaagaactgcagggacaagaccccacacacctcgtgcgagtgaagttcagcagaagcgctgacgcccctgcctacaagcagggacagaaccagctgtacaacgagctgaacctggggagaagagaagagtacgacgtgctggacaagcggagaggcagagatcctgagatgggcggcaagcccagacggaagaatcctcaagagggcctgtataatgagctgcagaaagataagatggccgaggcctactccgagatcggcatgaagggcgagcgcagaagaggcaagggacacgatggactgtaccagggcctgagcaccgccaccaaggatacctatgatgccctgcacatgcaggccctgccacctaga

SEQ ID NO: 175 - DNA, 1560 bp, Artificial Sequence
  CSR 2BB
atgagcttcccttgcaagttcgtggccagcttcctgctgatcttcaacgtgtcctctaagggcgccgtgtccaaagagatcacaaacgccctggaaacctggggagccctcggccaggatattaacctggacatccccagcttccagatgagcgacgacatcgatgacatcaagtgggagaaaaccagcgacaagaagaagatcgcccagttccggaaagagaaagagacattcaaagagaaggacacctacaagctgttcaagaacggcaccctgaagatcaagcacctgaaaaccgacgaccaggacatctataaggtgtccatctaccacaccaagggcaagaacgtgctggaaaagatcttcgacctcaagatccaagagcgggtgtccaagcctaagatcagctggacctgcatcaacaccacactgacctgcgaagtgatgaacggcacagaccccgagctgaacctgtaccaggatggcaaacacctgaagctgagccagcgcgtgatcacccacaagtggacaacaagcctgagcgccaagttcaagtgcaccgccggaaacaaagtgtctaaagagtccagcgtcgagcccgtgtcttgccctgaaaaaggcctggacattccctggctgggccatctgcttgttggactgtctggcgccttcggcttcatcatcctggtgtatctgctgatcaactgccggaacacaggcccctggctgaagaaagtgctgaagtgcaacacccctgatccgagcaagttctttagccagctgagcagcgagcatggcggcgacgttcagaaatggctgtctagcccatttcctagcagcagcttcagccctggtggactggcccctgagattagccctctggaagtgctggaacgggacaaagtgacccagctgctcctgcagcaggataaggtgccagaacctgccagcctgtccagcaatcacagcctgaccagctgctttaccaaccagggctacttcttcttccatctgcctgacgctctggaaatcgaggcctgccaggtgtacttcacctacgatccctacagcgaagaggaccccgatgaaggtgttgccggtgctcctaccggaagctctcctcaacctctgcaaccactgagcggcgaggatgacgcctactgcacattccccagcagagatgacctgctgctgttcagcccttctctgctcggtggaccttctccaccttctacagcacctggcggatctggcgcaggcgaggaaagaatgcctcctagcctgcaagagagagtgcccagagactgggatcctcagcctctcggacctcctacaccaggcgtgccagacctggtggattttcagcctcctccagagctggtgctgagagaagctggcgaagaagtgccagacgccggacctagagagggcgttagctttccttggagcagacctcctggacagggcgagttcagagccctgaatgctagactgcccctgaacaccgatgcctacctgtctctgcaagagctgcagggacaagaccccacacacctggtg

SEQ ID NO: 176 - DNA, 1896 bp, Artificial Sequence
  CSR 2BBz
atgagcttcccttgcaagttcgtggccagcttcctgctgatcttcaacgtgtcctctaagggcgccgtgtccaaagagatcacaaacgccctggaaacctggggagccctcggccaggatattaacctggacatccccagcttccagatgagcgacgacatcgatgacatcaagtgggagaaaaccagcgacaagaagaagatcgcccagttccggaaagagaaagagacattcaaagagaaggacacctacaagctgttcaagaacggcaccctgaagatcaagcacctgaaaaccgacgaccaggacatctataaggtgtccatctaccacaccaagggcaagaacgtgctggaaaagatcttcgacctcaagatccaagagcgggtgtccaagcctaagatcagctggacctgcatcaacaccacactgacctgcgaagtgatgaacggcacagaccccgagctgaacctgtaccaggatggcaaacacctgaagctgagccagcgcgtgatcacccacaagtggacaacaagcctgagcgccaagttcaagtgcaccgccggaaacaaagtgtctaaagagtccagcgtcgagcccgtgtcttgccctgaaaaaggcctggacattccctggctgggccatctgcttgttggactgtctggcgccttcggcttcatcatcctggtgtatctgctgatcaactgccggaacacaggcccctggctgaagaaagtgctgaagtgcaacacccctgatccgagcaagttctttagccagctgagcagcgagcatggcggcgacgttcagaaatggctgtctagcccatttcctagcagcagcttcagccctggtggactggcccctgagattagccctctggaagtgctggaacgggacaaagtgacccagctgctcctgcagcaggataaggtgccagaacctgccagcctgtccagcaatcacagcctgaccagctgctttaccaaccagggctacttcttcttccatctgcctgacgctctggaaatcgaggcctgccaggtgtacttcacctacgatccctacagcgaagaggaccccgatgaaggtgttgccggtgctcctaccggaagctctcctcaacctctgcaaccactgagcggcgaggatgacgcctactgcacattccccagcagagatgacctgctgctgttcagcccttctctgctcggtggaccttctccaccttctacagcacctggcggatctggcgcaggcgaggaaagaatgcctcctagcctgcaagagagagtgcccagagactgggatcctcagcctctcggacctcctacaccaggcgtgccagacctggtggattttcagcctcctccagagctggtgctgagagaagctggcgaagaagtgccagacgccggacctagagagggcgttagctttccttggagcagacctcctggacagggcgagttcagagccctgaatgctagactgcccctgaacaccgatgcctacctgtctctgcaagagctgcagggacaagaccccacacacctcgtcagagtgaagttcagccgcagcgctgatgcccctgcctacaagcagggacagaaccagctgtacaacgagctgaatctggggcgcagagaagagtacgatgtgctggacaagcggagaggcagagatcctgagatgggcggcaagcccagacggaagaatcctcaagagggcctgtataatgagctgcagaaagacaagatggccgaggcctactccgagatcggaatgaagggcgagcgcagaagaggcaagggacacgatggactgtatcagggcctgagcaccgccaccaaggatacctatgatgccctgcacatgcaggccctgcctccaaga

SEQ ID NO: 177 - DNA, 1563 bp, Artificial Sequence
  CSR 22B
atgagcttcccttgcaagttcgtggccagcttcctgctgatcttcaacgtgtcctctaagggcgccgtgtccaaagagatcacaaacgccctggaaacctggggagccctcggccaggatattaacctggacatccccagcttccagatgagcgacgacatcgatgacatcaagtgggagaaaaccagcgacaagaagaagatcgcccagttccggaaagagaaagagacattcaaagagaaggacacctacaagctgttcaagaacggcaccctgaagatcaagcacctgaaaaccgacgaccaggacatctataaggtgtccatctaccacaccaagggcaagaacgtgctggaaaagatcttcgacctcaagatccaagagcgggtgtccaagcctaagatcagctggacctgcatcaacaccacactgacctgcgaagtgatgaacggcacagaccccgagctgaacctgtaccaggatggcaaacacctgaagctgagccagcgcgtgatcacccacaagtggacaacaagcctgagcgccaagttcaagtgcaccgccggaaacaaagtgtctaaagagtccagcgtcgagcccgtgtcttgccctgaaaaaggactggacatctacctgatcatcggcatctgtggcggcggaagcctgctgatggtgtttgtggctctgctggtgttctacatcaccaactgccggaacacaggcccctggctgaagaaagtgctgaagtgcaacacccctgatccgagcaagttctttagccagctgagcagcgagcatggcggcgacgttcagaaatggctgtctagcccatttcctagcagcagcttcagccctggtggactggcccctgagattagccctctggaagtgctggaacgggacaaagtgacccagctgctcctgcagcaggataaggtgccagaacctgccagcctgtccagcaatcacagcctgaccagctgctttaccaaccagggctacttcttcttccatctgcctgacgctctggaaatcgaggcctgccaggtgtacttcacctacgatccctacagcgaagaggaccccgatgaaggtgttgccggtgctcctaccggaagctctcctcaacctctgcaaccactgagcggcgaggatgacgcctactgcacattccccagcagagatgacctgctgctgttcagcccttctctgctcggtggaccttctccaccttctacagcacctggcggatctggcgcaggcgaggaaagaatgcctcctagcctgcaagagagagtgcccagagactgggatcctcagcctctcggacctcctacaccaggcgtgccagacctggtggattttcagcctcctccagagctggtgctgagagaagctggcgaagaagtgccagacgccggacctagagagggcgttagctttccttggagcagacctcctggacagggcgagttcagagccctgaatgctagactgcccctgaacaccgatgcctacctgtctctgcaagagctgcagggacaagaccccacacacctggtg

SEQ ID NO: 178 - DNA, 1899 bp, Artificial Sequence
  CSR 22Bz
atgagcttcccttgcaagttcgtggccagcttcctgctgatcttcaacgtgtcctctaagggcgccgtgtccaaagagatcacaaacgccctggaaacctggggagccctcggccaggatattaacctggacatccccagcttccagatgagcgacgacatcgatgacatcaagtgggagaaaaccagcgacaagaagaagatcgcccagttccggaaagagaaagagacattcaaagagaaggacacctacaagctgttcaagaacggcaccctgaagatcaagcacctgaaaaccgacgaccaggacatctataaggtgtccatctaccacaccaagggcaagaacgtgctggaaaagatcttcgacctcaagatccaagagcgggtgtccaagcctaagatcagctggacctgcatcaacaccacactgacctgcgaagtgatgaacggcacagaccccgagctgaacctgtaccaggatggcaaacacctgaagctgagccagcgcgtgatcacccacaagtggacaacaagcctgagcgccaagttcaagtgcaccgccggaaacaaagtgtctaaagagtccagcgtcgagcccgtgtcttgccctgaaaaaggactggacatctacctgatcatcggcatctgtggcggcggaagcctgctgatggtgtttgtggctctgctggtgttctacatcaccaactgccggaacacaggcccctggctgaagaaagtgctgaagtgcaacacccctgatccgagcaagttctttagccagctgagcagcgagcatggcggcgacgttcagaaatggctgtctagcccatttcctagcagcagcttcagccctggtggactggcccctgagattagccctctggaagtgctggaacgggacaaagtgacccagctgctcctgcagcaggataaggtgccagaacctgccagcctgtccagcaatcacagcctgaccagctgctttaccaaccagggctacttcttcttccatctgcctgacgctctggaaatcgaggcctgccaggtgtacttcacctacgatccctacagcgaagaggaccccgatgaaggtgttgccggtgctcctaccggaagctctcctcaacctctgcaaccactgagcggcgaggatgacgcctactgcacattccccagcagagatgacctgctgctgttcagcccttctctgctcggtggaccttctccaccttctacagcacctggcggatctggcgcaggcgaggaaagaatgcctcctagcctgcaagagagagtgcccagagactgggatcctcagcctctcggacctcctacaccaggcgtgccagacctggtggattttcagcctcctccagagctggtgctgagagaagctggcgaagaagtgccagacgccggacctagagagggcgttagctttccttggagcagacctcctggacagggcgagttcagagccctgaatgctagactgcccctgaacaccgatgcctacctgtctctgcaagagctgcagggacaagaccccacacacctcgtcagagtgaagttcagccgcagcgctgatgcccctgcctacaagcagggacagaaccagctgtacaacgagctgaatctggggcgcagagaagagtacgatgtgctggacaagcggagaggcagagatcctgagatgggcggcaagcccagacggaagaatcctcaagagggcctgtataatgagctgcagaaagacaagatggccgaggcctactccgagatcggaatgaagggcgagcgcagaagaggcaagggacacgatggactgtatcagggcctgagcaccgccaccaaggatacctatgatgccctgcacatgcaggccctgcctccaaga

SEQ ID NO: 179 - DNA, 1443 bp, Artificial Sequence
  CSR GGGz
atgctgaagcccagcctgccttttaccagcctgctgttcctgcagctgcctctgcttggcgtgggcctgaataccaccatcctgacacctaacggcaacgaggatacaaccgccgacttcttcctgaccaccatgcctaccgatagcctgagcgtgtccacactgccactgcctgaggtgcagtgcttcgtgttcaacgtcgagtacatgaactgcacctggaacagctccagcgagccccagcctaccaatctgacactgcactactggtacaagaacagcgacaacgacaaggtgcagaagtgcagccactacctgttcagcgaggaaatcaccagcggctgccagctgcagaagaaagagatccacctgtaccagaccttcgtggtgcagctccaggatcctagagagcctagaaggcaggccacacagatgctgaaactgcagaacctggtcatcccctgggctcccgaaaacctgactctgcacaagctgagcgagagccagctggaactgaactggaacaaccggttcctgaatcactgcctggaacacctggtgcagtaccggaccgattgggatcacagctggacagagcagagcgtggactaccggcacaagttcagcctgccatctgtggacggccagaagcggtacacctttagagtgcggagccggttcaatcccctgtgtggatctgctcagcattggagcgagtggtcacaccctatccactggggcagcaacaccagcaaagagaaccccttcctgttcgccctggaagccgtggttatcagcgtgggctctatgggcctgatcatctccctgctgtgcgtgtacttctggctggaaagaaccatgcctcggatccccacactgaagaatctggaagatctggtcaccgagtaccacggcaacttcagtgcttggagcggcgtgtcaaaaggcctggccgaatctctgcagcccgactactctgagagactgtgcctggtgtctgagatccctcctaaaggcggagccctcggagaaggacctggcgcctctccatgtaatcagcacagcccttattgggcccctccttgctacaccctgaagcctgagacaagagtgaagttcagcagaagcgccgacgctcccgcctataagcagggacagaaccagctgtacaacgagctgaacctggggagaagagaagagtacgacgtgctggacaagcggagaggcagagatcctgagatgggcggcaagcccagacggaagaatcctcaagagggcctgtataatgagctgcaaaaggacaagatggccgaggcctacagcgagatcggaatgaagggcgagcgcagaagaggcaagggacacgatggactgtaccagggcctgagcaccgccaccaaggatacctatgatgccctgcacatgcaggccctgcctccaaga

SEQ ID NO: 180 - DNA, 951 bp, Artificial Sequence
  CSR 2GG
atgagcttcccttgcaagttcgtggccagcttcctgctgatcttcaacgtgtcctctaagggcgccgtgtccaaagagatcacaaacgccctggaaacctggggagccctcggccaggatattaacctggacatccccagcttccagatgagcgacgacatcgatgacatcaagtgggagaaaaccagcgacaagaagaagatcgcccagttccggaaagagaaagagacattcaaagagaaggacacctacaagctgttcaagaacggcaccctgaagatcaagcacctgaaaaccgacgaccaggacatctataaggtgtccatctaccacaccaagggcaagaacgtgctggaaaagatcttcgacctcaagatccaagagcgggtgtccaagcctaagatcagctggacctgcatcaacaccacactgacctgcgaagtgatgaacggcacagaccccgagctgaacctgtaccaggatggcaaacacctgaagctgagccagcgcgtgatcacccacaagtggacaacaagcctgagcgccaagttcaagtgcaccgccggaaacaaagtgtctaaagagtccagcgtcgagcccgtgtcttgccctgagaaaggactggatgccgtggtcatcagcgtgggctctatgggcctgatcatcagcctgctgtgcgtgtacttctggctggaacggaccatgcctcggatccccacactgaagaacctggaagatctggtcaccgagtaccacggcaacttctctgcttggagcggcgtcagtaaaggcctggccgaatctctgcagcccgactactctgagagactgtgcctggtgtctgagatccctcctaaaggcggagcccttggagaaggacctggcgcctctccatgtaaccagcacagcccttattgggcccctccttgctacactctgaagcccgagaca

SEQ ID NO: 181 - DNA, 1287 bp, Artificial Sequence
  CSR 2GGz
atgagcttcccttgcaagttcgtggccagcttcctgctgatcttcaacgtgtcctctaagggcgccgtgtccaaagagatcacaaacgccctggaaacctggggagccctcggccaggatattaacctggacatccccagcttccagatgagcgacgacatcgatgacatcaagtgggagaaaaccagcgacaagaagaagatcgcccagttccggaaagagaaagagacattcaaagagaaggacacctacaagctgttcaagaacggcaccctgaagatcaagcacctgaaaaccgacgaccaggacatctataaggtgtccatctaccacaccaagggcaagaacgtgctggaaaagatcttcgacctcaagatccaagagcgggtgtccaagcctaagatcagctggacctgcatcaacaccacactgacctgcgaagtgatgaacggcacagaccccgagctgaacctgtaccaggatggcaaacacctgaagctgagccagcgcgtgatcacccacaagtggacaacaagcctgagcgccaagttcaagtgcaccgccggaaacaaagtgtctaaagagtccagcgtcgagcccgtgtcttgccctgagaaaggactggatgccgtggtcatcagcgtgggctctatgggcctgatcatcagcctgctgtgcgtgtacttctggctggaacggaccatgcctcggatccccacactgaagaacctggaagatctggtcaccgagtaccacggcaacttctctgcttggagcggcgtcagtaaaggcctggccgaatctctgcagcccgactactctgagagactgtgcctggtgtctgagatccctcctaaaggcggagcccttggagaaggacctggcgcctctccatgtaaccagcacagcccttattgggcccctccttgctacactctgaagcccgagacaagagtgaagttcagcagatccgccgacgctcccgcctataagcagggacagaaccagctgtacaacgagctgaatctggggcgcagagaagagtacgatgtgctggacaagcggagaggcagagatcctgagatgggcggcaagcccagacggaagaatcctcaagagggcctgtataatgagctgcagaaagacaagatggccgaggcctacagcgagatcggaatgaagggcgagcgcagaagaggcaagggacacgatggactgtatcagggcctgagcaccgccaccaaggatacctatgatgccctgcacatgcaggccctgcctccaaga

SEQ ID NO: 182 - DNA, 963 bp, Artificial Sequence
  CSR 22G
atgagcttcccttgcaagttcgtggccagcttcctgctgatcttcaacgtgtcctctaagggcgccgtgtccaaagagatcacaaacgccctggaaacctggggagccctcggccaggatattaacctggacatccccagcttccagatgagcgacgacatcgatgacatcaagtgggagaaaaccagcgacaagaagaagatcgcccagttccggaaagagaaagagacattcaaagagaaggacacctacaagctgttcaagaacggcaccctgaagatcaagcacctgaaaaccgacgaccaggacatctataaggtgtccatctaccacaccaagggcaagaacgtgctggaaaagatcttcgacctcaagatccaagagcgggtgtccaagcctaagatcagctggacctgcatcaacaccacactgacctgcgaagtgatgaacggcacagaccccgagctgaacctgtaccaggatggcaaacacctgaagctgagccagcgcgtgatcacccacaagtggacaacaagcctgagcgccaagttcaagtgcaccgccggaaacaaagtgtctaaagagtccagcgtcgagcccgtgtcttgccctgaaaaaggactggacatctacctgatcatcggcatctgtggcggcggaagcctgctgatggtgtttgtggctctgctggtgttctacatcaccgagcggaccatgcctcggatccccacactgaagaacctggaagatctggtcaccgagtaccacggcaacttctctgcttggagcggcgtcagtaaaggcctggccgaatctctgcagcccgactactctgagagactgtgcctggtgtctgagatccctcctaaaggcggagcccttggagaaggacctggcgcctctccatgtaaccagcacagcccttattgggcccctccttgctacactctgaagcccgagaca

SEQ ID NO: 183 - DNA, 1299 bp, Artificial Sequence
  CSR 22Gz
atgagcttcccttgcaagttcgtggccagcttcctgctgatcttcaacgtgtcctctaagggcgccgtgtccaaagagatcacaaacgccctggaaacctggggagccctcggccaggatattaacctggacatccccagcttccagatgagcgacgacatcgatgacatcaagtgggagaaaaccagcgacaagaagaagatcgcccagttccggaaagagaaagagacattcaaagagaaggacacctacaagctgttcaagaacggcaccctgaagatcaagcacctgaaaaccgacgaccaggacatctataaggtgtccatctaccacaccaagggcaagaacgtgctggaaaagatcttcgacctcaagatccaagagcgggtgtccaagcctaagatcagctggacctgcatcaacaccacactgacctgcgaagtgatgaacggcacagaccccgagctgaacctgtaccaggatggcaaacacctgaagctgagccagcgcgtgatcacccacaagtggacaacaagcctgagcgccaagttcaagtgcaccgccggaaacaaagtgtctaaagagtccagcgtcgagcccgtgtcttgccctgaaaaaggactggacatctacctgatcatcggcatctgtggcggcggaagcctgctgatggtgtttgtggctctgctggtgttctacatcaccgagcggaccatgcctcggatccccacactgaagaacctggaagatctggtcaccgagtaccacggcaacttctctgcttggagcggcgtcagtaaaggcctggccgaatctctgcagcccgactactctgagagactgtgcctggtgtctgagatccctcctaaaggcggagcccttggagaaggacctggcgcctctccatgtaaccagcacagcccttattgggcccctccttgctacactctgaagcccgagacaagagtgaagttcagcagatccgccgacgctcccgcctataagcagggacagaaccagctgtacaacgagctgaatctggggcgcagagaagagtacgatgtgctggacaagcggagaggcagagatcctgagatgggcggcaagcccagacggaagaatcctcaagagggcctgtataatgagctgcagaaagacaagatggccgaggcctacagcgagatcggaatgaagggcgagcgcagaagaggcaagggacacgatggactgtatcagggcctgagcaccgccaccaaggatacctatgatgccctgcacatgcaggccctgcctccaaga

SEQ ID NO: 184 - DNA, 1818 bp, Artificial Sequence
  CSR 2BBG
atgagcttcccttgcaagttcgtggccagcttcctgctgatcttcaacgtgtcctctaagggcgccgtgtccaaagagatcacaaacgccctggaaacctggggagccctcggccaggatattaacctggacatccccagcttccagatgagcgacgacatcgatgacatcaagtgggagaaaaccagcgacaagaagaagatcgcccagttccggaaagagaaagagacattcaaagagaaggacacctacaagctgttcaagaacggcaccctgaagatcaagcacctgaaaaccgacgaccaggacatctataaggtgtccatctaccacaccaagggcaagaacgtgctggaaaagatcttcgacctcaagatccaagagcgggtgtccaagcctaagatcagctggacctgcatcaacaccacactgacctgcgaagtgatgaacggcacagaccccgagctgaacctgtaccaggatggcaaacacctgaagctgagccagcgcgtgatcacccacaagtggacaacaagcctgagcgccaagttcaagtgcaccgccggaaacaaagtgtctaaagagtccagcgtcgagcccgtgtcttgccctgaaaaaggcctggacattccctggctgggccatctgcttgttggactgtctggcgccttcggcttcatcatcctggtgtatctgctgatcaactgccggaacacaggcccctggctgaagaaagtgctgaagtgcaacacccctgatccgagcaagttctttagccagctgagcagcgagcatggcggcgacgttcagaaatggctgtctagcccatttcctagcagcagcttcagccctggtggactggcccctgagattagccctctggaagtgctggaacgggacaaagtgacccagctgctcctgcagcaggataaggtgccagaacctgccagcctgtccagcaatcacagcctgaccagctgctttaccaaccagggctacttcttcttccatctgcctgacgctctggaaatcgaggcctgccaggtgtacttcacctacgatccctacagcgaagaggaccccgatgaaggtgttgccggtgctcctaccggaagctctcctcaacctctgcaaccactgagcggcgaggatgacgcctactgcacattccccagcagagatgacctgctgctgttcagcccttctctgctcggtggaccttctccaccttctacagcacctggcggatctggcgcaggcgaggaaagaatgcctcctagcctgcaagagagagtgcccagagactgggatcctcagcctctcggacctcctacaccaggcgtgccagacctggtggattttcagcctcctccagagctggtgctgagagaagctggcgaagaagtgccagacgccggacctagagagggcgttagctttccttggagcagacctcctggacagggcgagttcagagccctgaatgctagactgcccctgaacaccgatgcctacctgtctctgcaagagctgcagggacaagaccccacacatctggtggaacggaccatgcctagaatccccacactgaagaacctggaagatctggtcaccgagtaccacggcaacttcagtgcttggagcggcgtcagcaaaggactggccgaatctctgcagcccgactacagcgagagactgtgcctggtgtctgagatccctcctaaaggcggagcccttggagaaggacctggcgcctctccatgtaaccagcacagcccttattgggcccctccttgctacactctgaagcccgagaca

SEQ ID NO: 185 - DNA, 2154 bp, Artificial Sequence
  CSR 2BBGz
atgagcttcccttgcaagttcgtggccagcttcctgctgatcttcaacgtgtcctctaagggcgccgtgtccaaagagatcacaaacgccctggaaacctggggagccctcggccaggatattaacctggacatccccagcttccagatgagcgacgacatcgatgacatcaagtgggagaaaaccagcgacaagaagaagatcgcccagttccggaaagagaaagagacattcaaagagaaggacacctacaagctgttcaagaacggcaccctgaagatcaagcacctgaaaaccgacgaccaggacatctataaggtgtccatctaccacaccaagggcaagaacgtgctggaaaagatcttcgacctcaagatccaagagcgggtgtccaagcctaagatcagctggacctgcatcaacaccacactgacctgcgaagtgatgaacggcacagaccccgagctgaacctgtaccaggatggcaaacacctgaagctgagccagcgcgtgatcacccacaagtggacaacaagcctgagcgccaagttcaagtgcaccgccggaaacaaagtgtctaaagagtccagcgtcgagcccgtgtcttgccctgaaaaaggcctggacattccctggctgggccatctgcttgttggactgtctggcgccttcggcttcatcatcctggtgtatctgctgatcaactgccggaacacaggcccctggctgaagaaagtgctgaagtgcaacacccctgatccgagcaagttctttagccagctgagcagcgagcatggcggcgacgttcagaaatggctgtctagcccatttcctagcagcagcttcagccctggtggactggcccctgagattagccctctggaagtgctggaacgggacaaagtgacccagctgctcctgcagcaggataaggtgccagaacctgccagcctgtccagcaatcacagcctgaccagctgctttaccaaccagggctacttcttcttccatctgcctgacgctctggaaatcgaggcctgccaggtgtacttcacctacgatccctacagcgaagaggaccccgatgaaggtgttgccggtgctcctaccggaagctctcctcaacctctgcaaccactgagcggcgaggatgacgcctactgcacattccccagcagagatgacctgctgctgttcagcccttctctgctcggtggaccttctccaccttctacagcacctggcggatctggcgcaggcgaggaaagaatgcctcctagcctgcaagagagagtgcccagagactgggatcctcagcctctcggacctcctacaccaggcgtgccagacctggtggattttcagcctcctccagagctggtgctgagagaagctggcgaagaagtgccagacgccggacctagagagggcgttagctttccttggagcagacctcctggacagggcgagttcagagccctgaatgctagactgcccctgaacaccgatgcctacctgtctctgcaagagctgcagggacaagaccccacacatctggtggaacggaccatgcctagaatccccacactgaagaacctggaagatctggtcaccgagtaccacggcaacttcagtgcttggagcggcgtcagcaaaggactggccgaatctctgcagcccgactacagcgagagactgtgcctggtgtctgagatccctcctaaaggcggagcccttggagaaggacctggcgcctctccatgtaaccagcacagcccttattgggcccctccttgctacactctgaagcccgagacaagagtgaagttcagccgcagcgctgatgcccctgcctacaagcagggacagaaccagctgtacaacgagctgaatctggggcgcagagaagagtacgatgtgctggacaagcggagaggcagagatcctgagatgggcggcaagcccagacggaagaatcctcaagagggcctgtataatgagctgcagaaagacaagatggccgaggcctactccgagatcggaatgaagggcgagcgcagaagaggcaagggacacgatggactgtatcagggcctgagcaccgccaccaaggatacctatgatgccctgcacatgcaggccctgcctccaaga

SEQ ID NO: 186 - DNA, 1821 bp, Artificial Sequence
  CSR 22BG
atgagcttcccttgcaagttcgtggccagcttcctgctgatcttcaacgtgtcctctaagggcgccgtgtccaaagagatcacaaacgccctggaaacctggggagccctcggccaggatattaacctggacatccccagcttccagatgagcgacgacatcgatgacatcaagtgggagaaaaccagcgacaagaagaagatcgcccagttccggaaagagaaagagacattcaaagagaaggacacctacaagctgttcaagaacggcaccctgaagatcaagcacctgaaaaccgacgaccaggacatctataaggtgtccatctaccacaccaagggcaagaacgtgctggaaaagatcttcgacctcaagatccaagagcgggtgtccaagcctaagatcagctggacctgcatcaacaccacactgacctgcgaagtgatgaacggcacagaccccgagctgaacctgtaccaggatggcaaacacctgaagctgagccagcgcgtgatcacccacaagtggacaacaagcctgagcgccaagttcaagtgcaccgccggaaacaaagtgtctaaagagtccagcgtcgagcccgtgtcttgccctgaaaaaggactggacatctacctgatcatcggcatctgtggcggcggaagcctgctgatggtgtttgtggctctgctggtgttctacatcaccaactgccggaacacaggcccctggctgaagaaagtgctgaagtgcaacacccctgatccgagcaagttctttagccagctgagcagcgagcatggcggcgacgttcagaaatggctgtctagcccatttcctagcagcagcttcagccctggtggactggcccctgagattagccctctggaagtgctggaacgggacaaagtgacccagctgctcctgcagcaggataaggtgccagaacctgccagcctgtccagcaatcacagcctgaccagctgctttaccaaccagggctacttcttcttccatctgcctgacgctctggaaatcgaggcctgccaggtgtacttcacctacgatccctacagcgaagaggaccccgatgaaggtgttgccggtgctcctaccggaagctctcctcaacctctgcaaccactgagcggcgaggatgacgcctactgcacattccccagcagagatgacctgctgctgttcagcccttctctgctcggtggaccttctccaccttctacagcacctggcggatctggcgcaggcgaggaaagaatgcctcctagcctgcaagagagagtgcccagagactgggatcctcagcctctcggacctcctacaccaggcgtgccagacctggtggattttcagcctcctccagagctggtgctgagagaagctggcgaagaagtgccagacgccggacctagagagggcgttagctttccttggagcagacctcctggacagggcgagttcagagccctgaatgctagactgcccctgaacaccgatgcctacctgtctctgcaagagctgcagggacaagaccccacacatctggtggaacggaccatgcctagaatccccacactgaagaacctggaagatctggtcaccgagtaccacggcaacttcagtgcttggagcggcgtcagtaaaggcctggccgaatctctgcagcccgactactctgagagactgtgcctggtgtctgagatccctcctaaaggcggagcccttggagaaggacctggcgcctctccatgtaaccagcacagcccttattgggcccctccttgctacactctgaagcccgagaca

SEQ ID NO: 187 - DNA, 2157 bp, Artificial Sequence
  CSR 22BGz
atgagcttcccttgcaagttcgtggccagcttcctgctgatcttcaacgtgtcctctaagggcgccgtgtccaaagagatcacaaacgccctggaaacctggggagccctcggccaggatattaacctggacatccccagcttccagatgagcgacgacatcgatgacatcaagtgggagaaaaccagcgacaagaagaagatcgcccagttccggaaagagaaagagacattcaaagagaaggacacctacaagctgttcaagaacggcaccctgaagatcaagcacctgaaaaccgacgaccaggacatctataaggtgtccatctaccacaccaagggcaagaacgtgctggaaaagatcttcgacctcaagatccaagagcgggtgtccaagcctaagatcagctggacctgcatcaacaccacactgacctgcgaagtgatgaacggcacagaccccgagctgaacctgtaccaggatggcaaacacctgaagctgagccagcgcgtgatcacccacaagtggacaacaagcctgagcgccaagttcaagtgcaccgccggaaacaaagtgtctaaagagtccagcgtcgagcccgtgtcttgccctgaaaaaggactggacatctacctgatcatcggcatctgtggcggcggaagcctgctgatggtgtttgtggctctgctggtgttctacatcaccaactgccggaacacaggcccctggctgaagaaagtgctgaagtgcaacacccctgatccgagcaagttctttagccagctgagcagcgagcatggcggcgacgttcagaaatggctgtctagcccatttcctagcagcagcttcagccctggtggactggcccctgagattagccctctggaagtgctggaacgggacaaagtgacccagctgctcctgcagcaggataaggtgccagaacctgccagcctgtccagcaatcacagcctgaccagctgctttaccaaccagggctacttcttcttccatctgcctgacgctctggaaatcgaggcctgccaggtgtacttcacctacgatccctacagcgaagaggaccccgatgaaggtgttgccggtgctcctaccggaagctctcctcaacctctgcaaccactgagcggcgaggatgacgcctactgcacattccccagcagagatgacctgctgctgttcagcccttctctgctcggtggaccttctccaccttctacagcacctggcggatctggcgcaggcgaggaaagaatgcctcctagcctgcaagagagagtgcccagagactgggatcctcagcctctcggacctcctacaccaggcgtgccagacctggtggattttcagcctcctccagagctggtgctgagagaagctggcgaagaagtgccagacgccggacctagagagggcgttagctttccttggagcagacctcctggacagggcgagttcagagccctgaatgctagactgcccctgaacaccgatgcctacctgtctctgcaagagctgcagggacaagaccccacacatctggtggaacggaccatgcctagaatccccacactgaagaacctggaagatctggtcaccgagtaccacggcaacttcagtgcttggagcggcgtcagtaaaggcctggccgaatctctgcagcccgactactctgagagactgtgcctggtgtctgagatccctcctaaaggcggagcccttggagaaggacctggcgcctctccatgtaaccagcacagcccttattgggcccctccttgctacactctgaagcccgagacaagagtgaagttcagccgcagcgctgatgcccctgcctacaagcagggacagaaccagctgtacaacgagctgaatctggggcgcagagaagagtacgatgtgctggacaagcggagaggcagagatcctgagatgggcggcaagcccagacggaagaatcctcaagagggcctgtataatgagctgcagaaagacaagatggccgaggcctactccgagatcggaatgaagggcgagcgcagaagaggcaagggacacgatggactgtatcagggcctgagcaccgccaccaaggatacctatgatgccctgcacatgcaggccctgcctccaaga

SEQ ID NO: 188 - DNA, 1809 bp, Artificial Sequence
  CSR 2GGB
atgagcttcccttgcaagttcgtggccagcttcctgctgatcttcaacgtgtcctctaagggcgccgtgtccaaagagatcacaaacgccctggaaacctggggagccctcggccaggatattaacctggacatccccagcttccagatgagcgacgacatcgatgacatcaagtgggagaaaaccagcgacaagaagaagatcgcccagttccggaaagagaaagagacattcaaagagaaggacacctacaagctgttcaagaacggcaccctgaagatcaagcacctgaaaaccgacgaccaggacatctataaggtgtccatctaccacaccaagggcaagaacgtgctggaaaagatcttcgacctcaagatccaagagcgggtgtccaagcctaagatcagctggacctgcatcaacaccacactgacctgcgaagtgatgaacggcacagaccccgagctgaacctgtaccaggatggcaaacacctgaagctgagccagcgcgtgatcacccacaagtggacaacaagcctgagcgccaagttcaagtgcaccgccggaaacaaagtgtctaaagagtccagcgtcgagcccgtgtcttgccctgagaaaggactggatgccgtggtcatcagcgtgggctctatgggcctgatcatcagcctgctgtgcgtgtacttctggctggaacggaccatgcctcggatccccacactgaagaacctggaagatctggtcaccgagtaccacggcaacttctctgcttggagcggcgtcagtaaaggcctggccgaatctctgcagcccgactactctgagagactgtgcctggtgtctgagatccctcctaaaggcggagcccttggagaaggacctggcgcctctccatgtaaccagcacagcccttattgggcccctccttgctacactctgaagcccgagacaaactgccggaacacaggcccctggctgaagaaagtgctgaagtgcaacacccctgatccgagcaagttctttagccagctgagcagcgagcatggcggcgacgttcagaaatggctgtctagcccatttcctagcagcagcttcagccctggtggactggcccctgagattagccctctggaagtgctcgagcgggacaaagtgacacagctgctcctccagcaggacaaggtgccagaacctgccagcctgtccagcaatcacagcctgaccagctgctttaccaaccagggctacttcttcttccatctgcctgacgctctggaaatcgaggcctgccaggtgtacttcacctacgatccctacagcgaagaggaccccgatgaaggtgttgccggtgctcctaccggaagctctcctcaacctctccaacctctgagcggcgaggatgacgcctactgcacattccccagcagagatgacctgctgctgttcagccctagcctgctcggaggaccttctccaccatctacagctccaggtggaagcggagccggcgaggaaagaatgcctccaagcctgcaagagagagtgcccagagactgggatcctcagcctctcggacctcctacaccaggcgtgccagacctggtggattttcagcctcctccagagctggtgctgagagaagctggcgaagaagtgccagacgccggacctagagagggcgttagctttccttggagcagacctcctggacagggcgagttcagagccctgaatgctagactgcccctgaacaccgatgcctacctgtctctgcaagagctgcagggacaagaccccacacacctggtg

SEQ ID NO: 189 - DNA, 2145 bp, Artificial Sequence
  CSR 2GGBz
atgagcttcccttgcaagttcgtggccagcttcctgctgatcttcaacgtgtcctctaagggcgccgtgtccaaagagatcacaaacgccctggaaacctggggagccctcggccaggatattaacctggacatccccagcttccagatgagcgacgacatcgatgacatcaagtgggagaaaaccagcgacaagaagaagatcgcccagttccggaaagagaaagagacattcaaagagaaggacacctacaagctgttcaagaacggcaccctgaagatcaagcacctgaaaaccgacgaccaggacatctataaggtgtccatctaccacaccaagggcaagaacgtgctggaaaagatcttcgacctcaagatccaagagcgggtgtccaagcctaagatcagctggacctgcatcaacaccacactgacctgcgaagtgatgaacggcacagaccccgagctgaacctgtaccaggatggcaaacacctgaagctgagccagcgcgtgatcacccacaagtggacaacaagcctgagcgccaagttcaagtgcaccgccggaaacaaagtgtctaaagagtccagcgtcgagcccgtgtcttgccctgagaaaggactggatgccgtggtcatcagcgtgggctctatgggcctgatcatcagcctgctgtgcgtgtacttctggctggaacggaccatgcctcggatccccacactgaagaacctggaagatctggtcaccgagtaccacggcaacttctctgcttggagcggcgtcagtaaaggcctggccgaatctctgcagcccgactactctgagagactgtgcctggtgtctgagatccctcctaaaggcggagcccttggagaaggacctggcgcctctccatgtaaccagcacagcccttattgggcccctccttgctacactctgaagcccgagacaaactgccggaacacaggcccctggctgaagaaagtgctgaagtgcaacacccctgatccgagcaagttctttagccagctgagcagcgagcatggcggcgacgttcagaaatggctgtctagcccatttcctagcagcagcttcagccctggtggactggcccctgagattagccctctggaagtgctcgagcgggacaaagtgacacagctgctcctccagcaggacaaggtgccagaacctgccagcctgtccagcaatcacagcctgaccagctgctttaccaaccagggctacttcttcttccatctgcctgacgctctggaaatcgaggcctgccaggtgtacttcacctacgatccctacagcgaagaggaccccgatgaaggtgttgccggtgctcctaccggaagctctcctcaacctctccaacctctgagcggcgaggatgacgcctactgcacattccccagcagagatgacctgctgctgttcagccctagcctgctcggaggaccttctccaccatctacagctccaggtggaagcggagccggcgaggaaagaatgcctccaagcctgcaagagagagtgcccagagactgggatcctcagcctctcggacctcctacaccaggcgtgccagacctggtggattttcagcctcctccagagctggtgctgagagaagctggcgaagaagtgccagacgccggacctagagagggcgttagctttccttggagcagacctcctggacagggcgagttcagagccctgaatgctagactgcccctgaacaccgatgcctacctgtctctgcaagagctgcagggacaagaccccacacacctcgtcagagtgaagttcagcagatccgccgacgctcccgcctataagcagggacagaaccagctgtacaacgagctgaatctggggcgcagagaagagtacgatgtgctggacaagcggagaggcagagatcctgagatgggcggcaagcccagacggaagaatcctcaagagggcctgtataatgagctgcagaaagacaagatggccgaggcctactccgagatcggaatgaagggcgagcgcagaagaggcaagggacacgatggactgtatcagggcctgagcaccgccaccaaggatacctatgatgccctgcacatgcaggccctgccacctaga

SEQ ID NO: 190 - DNA, 1821 bp, Artificial Sequence
  CSR 22GB
atgagcttcccttgcaagttcgtggccagcttcctgctgatcttcaacgtgtcctctaagggcgccgtgtccaaagagatcacaaacgccctggaaacctggggagccctcggccaggatattaacctggacatccccagcttccagatgagcgacgacatcgatgacatcaagtgggagaaaaccagcgacaagaagaagatcgcccagttccggaaagagaaagagacattcaaagagaaggacacctacaagctgttcaagaacggcaccctgaagatcaagcacctgaaaaccgacgaccaggacatctataaggtgtccatctaccacaccaagggcaagaacgtgctggaaaagatcttcgacctcaagatccaagagcgggtgtccaagcctaagatcagctggacctgcatcaacaccacactgacctgcgaagtgatgaacggcacagaccccgagctgaacctgtaccaggatggcaaacacctgaagctgagccagcgcgtgatcacccacaagtggacaacaagcctgagcgccaagttcaagtgcaccgccggaaacaaagtgtctaaagagtccagcgtcgagcccgtgtcttgccctgaaaaaggactggacatctacctgatcatcggcatctgtggcggcggaagcctgctgatggtgtttgtggctctgctggtgttctacatcaccgagcggaccatgcctcggatccccacactgaagaacctggaagatctggtcaccgagtaccacggcaacttctctgcttggagcggcgtcagtaaaggcctggccgaatctctgcagcccgactactctgagagactgtgcctggtgtctgagatccctcctaaaggcggagcccttggagaaggacctggcgcctctccatgtaaccagcacagcccttattgggcccctccttgctacactctgaagcccgagacaaactgccggaacacaggcccctggctgaagaaagtgctgaagtgcaacacccctgatccgagcaagttctttagccagctgagcagcgagcatggcggcgacgttcagaaatggctgtctagcccatttcctagcagcagcttcagccctggtggactggcccctgagattagccctctggaagtgctggaacgggacaaagtgacccagctgctcctgcagcaggataaggtgccagaacctgccagcctgtccagcaatcacagcctgaccagctgctttaccaaccagggctacttcttcttccatctgcctgacgctctggaaatcgaggcctgccaggtgtacttcacctacgatccctacagcgaagaggaccccgatgaaggtgttgccggtgctcctaccggaagctctcctcaacctctccaacctctgagcggcgaggatgacgcctactgcacattccccagcagagatgacctgctgctgttcagccctagcctgctcggaggaccttctccaccatctacagctccaggtggaagcggagccggcgaggaaagaatgcctccaagcctgcaagagagagtgcccagagactgggatcctcagcctctcggacctcctacaccaggcgtgccagacctggtggattttcagcctcctccagagctggtgctgagagaagctggcgaagaagtgccagacgccggacctagagagggcgttagctttccttggagcagacctcctggacagggcgagttcagagccctgaatgctagactgcccctgaacaccgatgcctacctgtctctgcaagagctgcagggacaagaccccacacacctggtg

SEQ ID NO: 191 - DNA, 2157 bp, Artificial Sequence
  CSR 22GBz
atgagcttcccttgcaagttcgtggccagcttcctgctgatcttcaacgtgtcctctaagggcgccgtgtccaaagagatcacaaacgccctggaaacctggggagccctcggccaggatattaacctggacatccccagcttccagatgagcgacgacatcgatgacatcaagtgggagaaaaccagcgacaagaagaagatcgcccagttccggaaagagaaagagacattcaaagagaaggacacctacaagctgttcaagaacggcaccctgaagatcaagcacctgaaaaccgacgaccaggacatctataaggtgtccatctaccacaccaagggcaagaacgtgctggaaaagatcttcgacctcaagatccaagagcgggtgtccaagcctaagatcagctggacctgcatcaacaccacactgacctgcgaagtgatgaacggcacagaccccgagctgaacctgtaccaggatggcaaacacctgaagctgagccagcgcgtgatcacccacaagtggacaacaagcctgagcgccaagttcaagtgcaccgccggaaacaaagtgtctaaagagtccagcgtcgagcccgtgtcttgccctgaaaaaggactggacatctacctgatcatcggcatctgtggcggcggaagcctgctgatggtgtttgtggctctgctggtgttctacatcaccgagcggaccatgcctcggatccccacactgaagaacctggaagatctggtcaccgagtaccacggcaacttctctgcttggagcggcgtcagtaaaggcctggccgaatctctgcagcccgactactctgagagactgtgcctggtgtctgagatccctcctaaaggcggagcccttggagaaggacctggcgcctctccatgtaaccagcacagcccttattgggcccctccttgctacactctgaagcccgagacaaactgccggaacacaggcccctggctgaagaaagtgctgaagtgcaacacccctgatccgagcaagttctttagccagctgagcagcgagcatggcggcgacgttcagaaatggctgtctagcccatttcctagcagcagcttcagccctggtggactggcccctgagattagccctctggaagtgctggaacgggacaaagtgacccagctgctcctgcagcaggataaggtgccagaacctgccagcctgtccagcaatcacagcctgaccagctgctttaccaaccagggctacttcttcttccatctgcctgacgctctggaaatcgaggcctgccaggtgtacttcacctacgatccctacagcgaagaggaccccgatgaaggtgttgccggtgctcctaccggaagctctcctcaacctctccaacctctgagcggcgaggatgacgcctactgcacattccccagcagagatgacctgctgctgttcagccctagcctgctcggaggaccttctccaccatctacagctccaggtggaagcggagccggcgaggaaagaatgcctccaagcctgcaagagagagtgcccagagactgggatcctcagcctctcggacctcctacaccaggcgtgccagacctggtggattttcagcctcctccagagctggtgctgagagaagctggcgaagaagtgccagacgccggacctagagagggcgttagctttccttggagcagacctcctggacagggcgagttcagagccctgaatgctagactgcccctgaacaccgatgcctacctgtctctgcaagagctgcagggacaagaccccacacacctcgtcagagtgaagttcagcagatccgccgacgctcccgcctataagcagggacagaaccagctgtacaacgagctgaatctggggcgcagagaagagtacgatgtgctggacaagcggagaggcagagatcctgagatgggcggcaagcccagacggaagaatcctcaagagggcctgtataatgagctgcagaaagacaagatggccgaggcctactccgagatcggaatgaagggcgagcgcagaagaggcaagggacacgatggactgtatcagggcctgagcaccgccaccaaggatacctatgatgccctgcacatgcaggccctgccacctaga

SEQ ID NO: 192 - DNA, 1638 bp, Artificial Sequence
  CSR 8BBB
atggctctgcctgtgacagctctgctgctgcctctggctctgcttctgcatgctgctagacctgccgtgaatggcaccagccagttcacctgtttctacaacagccgggccaacatcagctgcgtgtggtcacaagatggcgccctgcaggataccagctgtcaggttcacgcctggcctgatcggagaagatggaaccagacatgcgagctgctgcccgtgtctcaggctagctgggcctgtaatctgatcctgggagcccctgacagccagaaactgaccacagtggacatcgtgaccctgcgggtgctgtgtagagaaggcgttcgttggagagtgatggccattcaggacttcaagcccttcgagaacctgcggctgatggccccaattagcctgcaggttgtgcacgtggaaacccaccggtgcaatatcagctgggagatcagccaggccagccactacttcgagcggcacctggaattcgaggccagaacactgagccctggccacacctgggaagaagctcctctgctgaccctgaagcagaaacaagagtggatctgcctggaaaccctgacacctgacacacagtacgagttccaagtgcgcgtgaagcctctccagggcgagtttacaacatggtccccttggagtcagcccctggcctttagaacaaagcctgccgctctgggcaaagacacaatcccttggctgggccatctgctcgttggactgtctggcgccttcggcttcatcatcctggtgtacctgctgatcaactgccggaacacaggcccctggctgaagaaagtgctgaagtgcaacacccctgatccgagcaagttctttagccagctgagcagcgagcatggcggcgacgttcagaaatggctgtctagcccatttcctagcagcagcttcagccctggtggactggcccctgagattagccctctggaagtgctggaacgggacaaagtgacccagctgctcctgcagcaggataaggtgccagaacctgccagcctgtccagcaatcacagcctgaccagctgctttaccaaccagggctacttcttcttccatctgcctgacgcactggaaattgaggcctgccaggtgtacttcacctacgatccctacagcgaagaggaccccgatgaaggtgttgccggtgctcctaccggaagctctcctcaacctctgcaaccactgagcggcgaggatgacgcctactgcacattccccagcagagatgacctgctgctgttcagcccttctctgctcggcggaccttctccaccatctacagctccaggtggaagcggagccggcgaggaaagaatgcctccaagcctgcaagagcgggtgcccagagattgggatcctcaaccactgggccctccaacacctggcgtgccagatctcgtggatttccagcctcctccagagctggtgctgagagaagctggcgaagaagtgccagacgctggccctagagagggcgttagctttccttggagcagacctcctggacagggcgaattcagagccctgaatgccagactgcccctgaacaccgatgcctacctgtctctgcaagaactgcagggacaagaccccacacacctggtg

SEQ ID NO: 193 - DNA, 1974 bp, Artificial Sequence
  CSR 8BBBz
atggctctgcctgtgacagctctgctgctgcctctggctctgcttctgcatgctgctagacctgccgtgaatggcaccagccagttcacctgtttctacaacagccgggccaacatcagctgcgtgtggtcacaagatggcgccctgcaggataccagctgtcaggttcacgcctggcctgatcggagaagatggaaccagacatgcgagctgctgcccgtgtctcaggctagctgggcctgtaatctgatcctgggagcccctgacagccagaaactgaccacagtggacatcgtgaccctgcgggtgctgtgtagagaaggcgttcgttggagagtgatggccattcaggacttcaagcccttcgagaacctgcggctgatggccccaattagcctgcaggttgtgcacgtggaaacccaccggtgcaatatcagctgggagatcagccaggccagccactacttcgagcggcacctggaattcgaggccagaacactgagccctggccacacctgggaagaagctcctctgctgaccctgaagcagaaacaagagtggatctgcctggaaaccctgacacctgacacacagtacgagttccaagtgcgcgtgaagcctctccagggcgagtttacaacatggtccccttggagtcagcccctggcctttagaacaaagcctgccgctctgggcaaagacacaatcccttggctgggccatctgctcgttggactgtctggcgccttcggcttcatcatcctggtgtacctgctgatcaactgccggaacacaggcccctggctgaagaaagtgctgaagtgcaacacccctgatccgagcaagttctttagccagctgagcagcgagcatggcggcgacgttcagaaatggctgtctagcccatttcctagcagcagcttcagccctggtggactggcccctgagattagccctctggaagtgctggaacgggacaaagtgacccagctgctcctgcagcaggataaggtgccagaacctgccagcctgtccagcaatcacagcctgaccagctgctttaccaaccagggctacttcttcttccatctgcctgacgcactggaaattgaggcctgccaggtgtacttcacctacgatccctacagcgaagaggaccccgatgaaggtgttgccggtgctcctaccggaagctctcctcaacctctgcaaccactgagcggcgaggatgacgcctactgcacattccccagcagagatgacctgctgctgttcagcccttctctgctcggcggaccttctccaccatctacagctccaggtggaagcggagccggcgaggaaagaatgcctccaagcctgcaagagcgggtgcccagagattgggatcctcaaccactgggccctccaacacctggcgtgccagatctcgtggatttccagcctcctccagagctggtgctgagagaagctggcgaagaagtgccagacgctggccctagagagggcgttagctttccttggagcagacctcctggacagggcgaattcagagccctgaatgccagactgcccctgaacaccgatgcctacctgtctctgcaagaactgcagggacaagaccccacacacctcgtgcgagtgaagttcagcagaagcgctgacgcccctgcctacaagcagggacagaaccagctgtacaacgagctgaacctggggagaagagaagagtacgacgtgctggacaagcggagaggcagagatcctgagatgggcggcaagcccagacggaagaatcctcaagagggcctgtataatgagctgcagaaagataagatggccgaggcctactccgagatcggcatgaagggcgagcgcagaagaggcaagggacacgatggactgtaccagggcctgagcaccgccaccaaggatacctatgatgccctgcacatgcaggccctgccacctaga

SEQ ID NO: 194 - DNA, 1551 bp, Artificial Sequence
  CSR 82BB
atggctctgcctgtgacagctctgctgctgcctctggctctgcttctgcatgccgccagacctaaagagatcacaaacgccctggaaacctggggagccctcggccaggatattaacctggacatccccagcttccagatgagcgacgacatcgatgacatcaagtgggagaaaaccagcgacaagaagaagatcgcccagttccggaaagagaaagagacattcaaagagaaggacacctacaagctgttcaagaacggcaccctgaagatcaagcacctgaaaaccgacgaccaggacatctataaggtgtccatctaccacaccaagggcaagaacgtgctggaaaagatcttcgacctcaagatccaagagcgggtgtccaagcctaagatcagctggacctgcatcaacaccacactgacctgcgaagtgatgaacggcacagaccccgagctgaacctgtaccaggatggcaaacacctgaagctgagccagcgcgtgatcacccacaagtggacaacaagcctgagcgccaagttcaagtgcaccgccggaaacaaagtgtccaaagaaagcagcgtggaacccgtgtcttgccccgagaaaggcctggacattccttggctgggacatctgctcgtgggactgtctggcgccttcggctttatcatcctggtgtacctgctgatcaactgccggaacacaggcccctggctgaagaaagtgctgaagtgcaacacccctgatccgagcaagttctttagccagctgagcagcgagcatggcggcgacgttcagaaatggctgtctagcccatttcctagcagcagcttcagccctggtggactggcccctgagattagccctctggaagtgctggaacgggacaaagtgacccagctgctcctgcagcaggataaggtgccagaacctgccagcctgtccagcaatcacagcctgaccagctgctttaccaaccagggctacttcttcttccatctgcctgacgctctggaaatcgaggcctgccaggtgtacttcacctacgatccctacagcgaagaggaccccgatgaaggtgttgccggtgctcctaccggaagctctcctcaacctctgcaaccactgagcggcgaggatgacgcctactgcacattccccagcagagatgacctgctgctgttcagcccttctctgctcggtggaccttctccaccttctacagcacctggcggatctggcgcaggcgaggaaagaatgcctcctagcctgcaagagagagtgcccagagactgggatcctcagcctctcggacctcctacaccaggcgtgccagacctggtggattttcagcctcctccagagctggtgctgagagaagctggcgaagaagtgccagacgccggacctagagagggcgttagctttccttggagcagacctcctggacagggcgagttcagagccctgaatgctagactgcccctgaacaccgatgcctacctgtctctgcaagagctgcagggacaagaccccacacacctggtg

SEQ ID NO: 195 - DNA, 1887 bp, Artificial Sequence
  CSR 82BBz
atggctctgcctgtgacagctctgctgctgcctctggctctgcttctgcatgccgccagacctaaagagatcacaaacgccctggaaacctggggagccctcggccaggatattaacctggacatccccagcttccagatgagcgacgacatcgatgacatcaagtgggagaaaaccagcgacaagaagaagatcgcccagttccggaaagagaaagagacattcaaagagaaggacacctacaagctgttcaagaacggcaccctgaagatcaagcacctgaaaaccgacgaccaggacatctataaggtgtccatctaccacaccaagggcaagaacgtgctggaaaagatcttcgacctcaagatccaagagcgggtgtccaagcctaagatcagctggacctgcatcaacaccacactgacctgcgaagtgatgaacggcacagaccccgagctgaacctgtaccaggatggcaaacacctgaagctgagccagcgcgtgatcacccacaagtggacaacaagcctgagcgccaagttcaagtgcaccgccggaaacaaagtgtccaaagaaagcagcgtggaacccgtgtcttgccccgagaaaggcctggacattccttggctgggacatctgctcgtgggactgtctggcgccttcggctttatcatcctggtgtacctgctgatcaactgccggaacacaggcccctggctgaagaaagtgctgaagtgcaacacccctgatccgagcaagttctttagccagctgagcagcgagcatggcggcgacgttcagaaatggctgtctagcccatttcctagcagcagcttcagccctggtggactggcccctgagattagccctctggaagtgctggaacgggacaaagtgacccagctgctcctgcagcaggataaggtgccagaacctgccagcctgtccagcaatcacagcctgaccagctgctttaccaaccagggctacttcttcttccatctgcctgacgctctggaaatcgaggcctgccaggtgtacttcacctacgatccctacagcgaagaggaccccgatgaaggtgttgccggtgctcctaccggaagctctcctcaacctctgcaaccactgagcggcgaggatgacgcctactgcacattccccagcagagatgacctgctgctgttcagcccttctctgctcggtggaccttctccaccttctacagcacctggcggatctggcgcaggcgaggaaagaatgcctcctagcctgcaagagagagtgcccagagactgggatcctcagcctctcggacctcctacaccaggcgtgccagacctggtggattttcagcctcctccagagctggtgctgagagaagctggcgaagaagtgccagacgccggacctagagagggcgttagctttccttggagcagacctcctggacagggcgagttcagagccctgaatgctagactgcccctgaacaccgatgcctacctgtctctgcaagagctgcagggacaagaccccacacacctcgtcagagtgaagttcagcagaagcgccgacgctcccgcctataagcagggacagaaccagctgtacaacgagctgaatctggggcgcagagaagagtacgatgtgctggacaagcggagaggcagagatcctgagatgggcggcaagcccagacggaagaatcctcaagagggcctgtataatgagctgcagaaagacaagatggccgaggcctactccgagatcggaatgaagggcgagcgcagaagaggcaagggacacgatggactgtatcagggcctgagcaccgccaccaaggatacctatgatgccctgcacatgcaggccctgcctccaaga

SEQ ID NO: 196 - DNA, 1554 bp, Artificial Sequence
  CSR 822B
atggctctgcctgtgacagctctgctgctgcctctggctctgcttctgcatgccgccagacctaaagagatcacaaacgccctggaaacctggggagccctcggccaggatattaacctggacatccccagcttccagatgagcgacgacatcgatgacatcaagtgggagaaaaccagcgacaagaagaagatcgcccagttccggaaagagaaagagacattcaaagagaaggacacctacaagctgttcaagaacggcaccctgaagatcaagcacctgaaaaccgacgaccaggacatctataaggtgtccatctaccacaccaagggcaagaacgtgctggaaaagatcttcgacctcaagatccaagagcgggtgtccaagcctaagatcagctggacctgcatcaacaccacactgacctgcgaagtgatgaacggcacagaccccgagctgaacctgtaccaggatggcaaacacctgaagctgagccagcgcgtgatcacccacaagtggacaacaagcctgagcgccaagttcaagtgcaccgccggaaacaaagtgtccaaagaaagcagcgtggaacccgtgtcttgccccgagaaaggactggacatctacctgatcatcggcatctgtggcggcggaagcctgctgatggtgtttgttgccctgctggtgttctacatcaccaactgcagaaacacaggcccctggctgaagaaagtgctgaagtgcaacacccctgatccgagcaagttctttagccagctgagcagcgagcatggcggcgacgttcagaaatggctgtctagcccatttcctagcagcagcttcagccctggtggactggcccctgagattagccctctggaagtgctggaacgggacaaagtgacccagctgctcctgcagcaggataaggtgccagaacctgccagcctgtccagcaatcacagcctgaccagctgctttaccaaccagggctacttcttcttccatctgcctgacgctctggaaatcgaggcctgccaggtgtacttcacctacgatccctacagcgaagaggaccccgatgaaggtgttgccggtgctcctaccggaagctctcctcaacctctgcaaccactgagcggcgaggatgacgcctactgcacattccccagcagagatgacctgctgctgttcagcccttctctgctcggtggaccttctccaccttctacagcacctggcggatctggcgcaggcgaggaaagaatgcctcctagcctgcaagagagagtgcccagagactgggatcctcagcctctcggacctcctacaccaggcgtgccagacctggtggattttcagcctcctccagagctggtgctgagagaagctggcgaagaagtgccagacgccggacctagagagggcgttagctttccttggagcagacctcctggacagggcgagttcagagccctgaatgctagactgcccctgaacaccgatgcctacctgtctctgcaagagctgcagggacaagaccccacacacctggtg

SEQ ID NO: 197 - DNA, 1890 bp, Artificial Sequence
  CSR 822Bz
atggctctgcctgtgacagctctgctgctgcctctggctctgcttctgcatgccgccagacctaaagagatcacaaacgccctggaaacctggggagccctcggccaggatattaacctggacatccccagcttccagatgagcgacgacatcgatgacatcaagtgggagaaaaccagcgacaagaagaagatcgcccagttccggaaagagaaagagacattcaaagagaaggacacctacaagctgttcaagaacggcaccctgaagatcaagcacctgaaaaccgacgaccaggacatctataaggtgtccatctaccacaccaagggcaagaacgtgctggaaaagatcttcgacctcaagatccaagagcgggtgtccaagcctaagatcagctggacctgcatcaacaccacactgacctgcgaagtgatgaacggcacagaccccgagctgaacctgtaccaggatggcaaacacctgaagctgagccagcgcgtgatcacccacaagtggacaacaagcctgagcgccaagttcaagtgcaccgccggaaacaaagtgtccaaagaaagcagcgtggaacccgtgtcttgccccgagaaaggactggacatctacctgatcatcggcatctgtggcggcggaagcctgctgatggtgtttgttgccctgctggtgttctacatcaccaactgcagaaacacaggcccctggctgaagaaagtgctgaagtgcaacacccctgatccgagcaagttctttagccagctgagcagcgagcatggcggcgacgttcagaaatggctgtctagcccatttcctagcagcagcttcagccctggtggactggcccctgagattagccctctggaagtgctggaacgggacaaagtgacccagctgctcctgcagcaggataaggtgccagaacctgccagcctgtccagcaatcacagcctgaccagctgctttaccaaccagggctacttcttcttccatctgcctgacgctctggaaatcgaggcctgccaggtgtacttcacctacgatccctacagcgaagaggaccccgatgaaggtgttgccggtgctcctaccggaagctctcctcaacctctgcaaccactgagcggcgaggatgacgcctactgcacattccccagcagagatgacctgctgctgttcagcccttctctgctcggtggaccttctccaccttctacagcacctggcggatctggcgcaggcgaggaaagaatgcctcctagcctgcaagagagagtgcccagagactgggatcctcagcctctcggacctcctacaccaggcgtgccagacctggtggattttcagcctcctccagagctggtgctgagagaagctggcgaagaagtgccagacgccggacctagagagggcgttagctttccttggagcagacctcctggacagggcgagttcagagccctgaatgctagactgcccctgaacaccgatgcctacctgtctctgcaagagctgcagggacaagaccccacacacctcgtcagagtgaagttcagcagaagcgccgacgctcccgcctataagcagggacagaaccagctgtacaacgagctgaatctggggcgcagagaagagtacgatgtgctggacaagcggagaggcagagatcctgagatgggcggcaagcccagacggaagaatcctcaagagggcctgtataatgagctgcagaaagacaagatggccgaggcctactccgagatcggaatgaagggcgagcgcagaagaggcaagggacacgatggactgtatcagggcctgagcaccgccaccaaggatacctatgatgccctgcacatgcaggccctgcctccaaga

SEQ ID NO: 198 - DNA, 1104 bp, Artificial Sequence
  CSR 8GGG
atggctctgcctgtgacagctctgctgctgcctctggctctgcttctgcatgctgccagacctctgaacaccaccatcctgacacctaacggcaacgaggatacaaccgccgacttcttcctgaccaccatgcctaccgatagcctgagcgtgtccacactgcctctgcctgaggtgcagtgcttcgtgttcaacgtcgagtacatgaactgcacctggaacagcagcagcgagccccagcctaccaatctgacactgcactactggtacaagaacagcgacaacgacaaggtgcagaagtgcagccactacctgttcagcgaggaaatcaccagcggctgccagctgcagaagaaagagatccacctgtaccagaccttcgtggttcagctgcaggaccccagagagcctagaaggcaggctacccagatgctgaaactgcagaacctggtcatcccctgggctcccgaaaacctgactctgcacaagctgagcgagagccagctggaactgaactggaacaaccggttcctgaaccactgcctggaacacctggtgcagtacagaaccgactgggaccacagctggacagagcagagcgtggactaccggcacaagttcagcctgccatctgtggacggccagaagcggtacacctttagagtgcggagccggttcaatcccctgtgtggatctgctcagcattggagcgagtggtcacaccctatccactggggcagcaacaccagcaaagagaaccccttcctgttcgccctggaagccgtggttatcagcgtgggctctatgggcctgatcatcagcctgctgtgcgtgtacttctggctggaaagaaccatgcctcggatccccacactgaagaatctggaagatctggtcaccgagtaccacggcaacttctctgcttggagcggcgtgtcaaaaggcctggccgaatctctgcagcccgactactctgagagactgtgcctggtgtctgagatccctcctaaaggcggagccctcggagaaggacctggcgcctctccatgtaatcagcacagcccttattgggcccctccttgctacaccctgaagcctgagaca

SEQ ID NO: 199 - DNA, 1440 bp, Artificial Sequence
  CSR 8GGGz
atggctctgcctgtgacagctctgctgctgcctctggctctgcttctgcatgctgccagacctctgaacaccaccatcctgacacctaacggcaacgaggatacaaccgccgacttcttcctgaccaccatgcctaccgatagcctgagcgtgtccacactgcctctgcctgaggtgcagtgcttcgtgttcaacgtcgagtacatgaactgcacctggaacagcagcagcgagccccagcctaccaatctgacactgcactactggtacaagaacagcgacaacgacaaggtgcagaagtgcagccactacctgttcagcgaggaaatcaccagcggctgccagctgcagaagaaagagatccacctgtaccagaccttcgtggttcagctgcaggaccccagagagcctagaaggcaggctacccagatgctgaaactgcagaacctggtcatcccctgggctcccgaaaacctgactctgcacaagctgagcgagagccagctggaactgaactggaacaaccggttcctgaaccactgcctggaacacctggtgcagtacagaaccgactgggaccacagctggacagagcagagcgtggactaccggcacaagttcagcctgccatctgtggacggccagaagcggtacacctttagagtgcggagccggttcaatcccctgtgtggatctgctcagcattggagcgagtggtcacaccctatccactggggcagcaacaccagcaaagagaaccccttcctgttcgccctggaagccgtggttatcagcgtgggctctatgggcctgatcatcagcctgctgtgcgtgtacttctggctggaaagaaccatgcctcggatccccacactgaagaatctggaagatctggtcaccgagtaccacggcaacttctctgcttggagcggcgtgtcaaaaggcctggccgaatctctgcagcccgactactctgagagactgtgcctggtgtctgagatccctcctaaaggcggagccctcggagaaggacctggcgcctctccatgtaatcagcacagcccttattgggcccctccttgctacaccctgaagcctgagacaagagtgaagttcagcagaagcgccgacgctcccgcctataagcagggacagaaccagctgtacaacgagctgaacctggggagaagagaagagtacgacgtgctggacaagcggagaggcagagatcctgagatgggcggcaagcccagacggaagaatcctcaagagggcctgtataatgagctgcaaaaggacaagatggccgaggcctacagcgagatcggaatgaagggcgagcgcagaagaggcaagggacacgatggactgtaccagggcctgagcaccgccaccaaggatacctatgatgccctgcacatgcaggccctgcctccaaga

SEQ ID NO: 200 - DNA, 942 bp, Artificial Sequence
  CSR 82GG
atggctctgcctgtgacagctctgctgctgcctctggctctgcttctgcatgccgccagacctaaagagatcacaaacgccctggaaacctggggagccctcggccaggatattaacctggacatccccagcttccagatgagcgacgacatcgatgacatcaagtgggagaaaaccagcgacaagaagaagatcgcccagttccggaaagagaaagagacattcaaagagaaggacacctacaagctgttcaagaacggcaccctgaagatcaagcacctgaaaaccgacgaccaggacatctataaggtgtccatctaccacaccaagggcaagaacgtgctggaaaagatcttcgacctcaagatccaagagcgggtgtccaagcctaagatcagctggacctgcatcaacaccacactgacctgcgaagtgatgaacggcacagaccccgagctgaacctgtaccaggatggcaaacacctgaagctgagccagcgcgtgatcacccacaagtggacaacaagcctgagcgccaagttcaagtgcaccgccggaaacaaagtgtccaaagaaagcagcgtggaacccgtgtcttgccccgagaaaggactggatgccgtggtcatcagcgtgggctctatgggcctgatcatcagcctgctgtgcgtgtacttctggctggaacggaccatgcctcggatccccacactgaagaacctggaagatctggtcaccgagtaccacggcaacttctctgcttggagtggcgtgtcaaaaggcctggccgaaagcctgcagcctgactactctgagagactgtgcctggtgtctgagatccctcctaaaggcggagcccttggagaaggacctggcgcctctccatgtaaccagcacagcccttattgggcccctccttgctacactctgaagcccgagaca

SEQ ID NO: 201 - DNA, 1278 bp, Artificial Sequence
  CSR 82GGz
atggctctgcctgtgacagctctgctgctgcctctggctctgcttctgcatgccgccagacctaaagagatcacaaacgccctggaaacctggggagccctcggccaggatattaacctggacatccccagcttccagatgagcgacgacatcgatgacatcaagtgggagaaaaccagcgacaagaagaagatcgcccagttccggaaagagaaagagacattcaaagagaaggacacctacaagctgttcaagaacggcaccctgaagatcaagcacctgaaaaccgacgaccaggacatctataaggtgtccatctaccacaccaagggcaagaacgtgctggaaaagatcttcgacctcaagatccaagagcgggtgtccaagcctaagatcagctggacctgcatcaacaccacactgacctgcgaagtgatgaacggcacagaccccgagctgaacctgtaccaggatggcaaacacctgaagctgagccagcgcgtgatcacccacaagtggacaacaagcctgagcgccaagttcaagtgcaccgccggaaacaaagtgtccaaagaaagcagcgtggaacccgtgtcttgccccgagaaaggactggatgccgtggtcatcagcgtgggctctatgggcctgatcatcagcctgctgtgcgtgtacttctggctggaacggaccatgcctcggatccccacactgaagaacctggaagatctggtcaccgagtaccacggcaacttctctgcttggagtggcgtgtcaaaaggcctggccgaaagcctgcagcctgactactctgagagactgtgcctggtgtctgagatccctcctaaaggcggagcccttggagaaggacctggcgcctctccatgtaaccagcacagcccttattgggcccctccttgctacactctgaagcccgagacaagagtgaagttcagcagaagcgccgacgctcccgcctataagcagggacagaaccagctgtacaacgagctgaatctggggcgcagagaagagtacgatgtgctggacaagcggagaggcagagatcctgagatgggcggcaagcccagacggaagaatcctcaagagggcctgtataatgagctgcagaaagacaagatggccgaggcctacagcgagatcggaatgaagggcgagcgcagaagaggcaagggacacgatggactgtatcagggcctgagcaccgccaccaaggatacctatgatgccctgcacatgcaggccctgcctccaaga

SEQ ID NO: 202 - DNA, 954 bp, Artificial Sequence
  CSR 822G
atggctctgcctgtgacagctctgctgctgcctctggctctgcttctgcatgccgccagacctaaagagatcacaaacgccctggaaacctggggagccctcggccaggatattaacctggacatccccagcttccagatgagcgacgacatcgatgacatcaagtgggagaaaaccagcgacaagaagaagatcgcccagttccggaaagagaaagagacattcaaagagaaggacacctacaagctgttcaagaacggcaccctgaagatcaagcacctgaaaaccgacgaccaggacatctataaggtgtccatctaccacaccaagggcaagaacgtgctggaaaagatcttcgacctcaagatccaagagcgggtgtccaagcctaagatcagctggacctgcatcaacaccacactgacctgcgaagtgatgaacggcacagaccccgagctgaacctgtaccaggatggcaaacacctgaagctgagccagcgcgtgatcacccacaagtggacaacaagcctgagcgccaagttcaagtgcaccgccggaaacaaagtgtccaaagaaagcagcgtggaacccgtgtcttgccccgagaaaggactggacatctacctgatcatcggcatctgtggcggcggaagcctgctgatggtgtttgttgccctgctggtgttctacatcaccgagcggaccatgcctcggatccccacactgaagaacctggaagatctggtcaccgagtaccacggcaacttctctgcttggagtggcgtgtcaaaaggcctggccgaaagcctgcagcctgactactctgagagactgtgcctggtgtctgagatccctcctaaaggcggagcccttggagaaggacctggcgcctctccatgtaaccagcacagcccttattgggcccctccttgctacactctgaagcccgagaca

SEQ ID NO: 203 - DNA, 1290 bp, Artificial Sequence
  CSR 822Gz
atggctctgcctgtgacagctctgctgctgcctctggctctgcttctgcatgccgccagacctaaagagatcacaaacgccctggaaacctggggagccctcggccaggatattaacctggacatccccagcttccagatgagcgacgacatcgatgacatcaagtgggagaaaaccagcgacaagaagaagatcgcccagttccggaaagagaaagagacattcaaagagaaggacacctacaagctgttcaagaacggcaccctgaagatcaagcacctgaaaaccgacgaccaggacatctataaggtgtccatctaccacaccaagggcaagaacgtgctggaaaagatcttcgacctcaagatccaagagcgggtgtccaagcctaagatcagctggacctgcatcaacaccacactgacctgcgaagtgatgaacggcacagaccccgagctgaacctgtaccaggatggcaaacacctgaagctgagccagcgcgtgatcacccacaagtggacaacaagcctgagcgccaagttcaagtgcaccgccggaaacaaagtgtccaaagaaagcagcgtggaacccgtgtcttgccccgagaaaggactggacatctacctgatcatcggcatctgtggcggcggaagcctgctgatggtgtttgttgccctgctggtgttctacatcaccgagcggaccatgcctcggatccccacactgaagaacctggaagatctggtcaccgagtaccacggcaacttctctgcttggagtggcgtgtcaaaaggcctggccgaaagcctgcagcctgactactctgagagactgtgcctggtgtctgagatccctcctaaaggcggagcccttggagaaggacctggcgcctctccatgtaaccagcacagcccttattgggcccctccttgctacactctgaagcccgagacaagagtgaagttcagcagaagcgccgacgctcccgcctataagcagggacagaaccagctgtacaacgagctgaatctggggcgcagagaagagtacgatgtgctggacaagcggagaggcagagatcctgagatgggcggcaagcccagacggaagaatcctcaagagggcctgtataatgagctgcagaaagacaagatggccgaggcctacagcgagatcggaatgaagggcgagcgcagaagaggcaagggacacgatggactgtatcagggcctgagcaccgccaccaaggatacctatgatgccctgcacatgcaggccctgcctccaaga

SEQ ID NO: 204 - DNA, 1809 bp, Artificial Sequence
  CSR 82BBG
atggctctgcctgtgacagctctgctgctgcctctggctctgcttctgcatgccgccagacctaaagagatcacaaacgccctggaaacctggggagccctcggccaggatattaacctggacatccccagcttccagatgagcgacgacatcgatgacatcaagtgggagaaaaccagcgacaagaagaagatcgcccagttccggaaagagaaagagacattcaaagagaaggacacctacaagctgttcaagaacggcaccctgaagatcaagcacctgaaaaccgacgaccaggacatctataaggtgtccatctaccacaccaagggcaagaacgtgctggaaaagatcttcgacctcaagatccaagagcgggtgtccaagcctaagatcagctggacctgcatcaacaccacactgacctgcgaagtgatgaacggcacagaccccgagctgaacctgtaccaggatggcaaacacctgaagctgagccagcgcgtgatcacccacaagtggacaacaagcctgagcgccaagttcaagtgcaccgccggaaacaaagtgtccaaagaaagcagcgtggaacccgtgtcttgccccgagaaaggcctggacattccttggctgggacatctgctcgtgggactgtctggcgccttcggctttatcatcctggtgtacctgctgatcaactgccggaacacaggcccctggctgaagaaagtgctgaagtgcaacacccctgatccgagcaagttctttagccagctgagcagcgagcatggcggcgacgttcagaaatggctgtctagcccatttcctagcagcagcttcagccctggtggactggcccctgagattagccctctggaagtgctggaacgggacaaagtgacccagctgctcctgcagcaggataaggtgccagaacctgccagcctgtccagcaatcacagcctgaccagctgctttaccaaccagggctacttcttcttccatctgcctgacgctctggaaatcgaggcctgccaggtgtacttcacctacgatccctacagcgaagaggaccccgatgaaggtgttgccggtgctcctaccggaagctctcctcaacctctgcaaccactgagcggcgaggatgacgcctactgcacattccccagcagagatgacctgctgctgttcagcccttctctgctcggtggaccttctccaccttctacagcacctggcggatctggcgcaggcgaggaaagaatgcctcctagcctgcaagagagagtgcccagagactgggatcctcagcctctcggacctcctacaccaggcgtgccagacctggtggattttcagcctcctccagagctggtgctgagagaagctggcgaagaagtgccagacgccggacctagagagggcgttagctttccttggagcagacctcctggacagggcgagttcagagccctgaatgctagactgcccctgaacaccgatgcctacctgtctctgcaagagctgcagggacaagaccccacacatctggtggaacggaccatgcctagaatccccacactgaagaacctggaagatctggtcaccgagtaccacggcaacttcagtgcttggagtggcgtgtcaaaaggactggccgagagcctgcagcctgactactctgagagactgtgcctggtgtctgagatccctcctaaaggcggagcccttggagaaggacctggcgcctctccatgtaaccagcacagcccttattgggcccctccttgctacactctgaagcccgagaca

SEQ ID NO: 205 - DNA, 2145 bp, Artificial Sequence
  CSR 82BBGz
atggctctgcctgtgacagctctgctgctgcctctggctctgcttctgcatgccgccagacctaaagagatcacaaacgccctggaaacctggggagccctcggccaggatattaacctggacatccccagcttccagatgagcgacgacatcgatgacatcaagtgggagaaaaccagcgacaagaagaagatcgcccagttccggaaagagaaagagacattcaaagagaaggacacctacaagctgttcaagaacggcaccctgaagatcaagcacctgaaaaccgacgaccaggacatctataaggtgtccatctaccacaccaagggcaagaacgtgctggaaaagatcttcgacctcaagatccaagagcgggtgtccaagcctaagatcagctggacctgcatcaacaccacactgacctgcgaagtgatgaacggcacagaccccgagctgaacctgtaccaggatggcaaacacctgaagctgagccagcgcgtgatcacccacaagtggacaacaagcctgagcgccaagttcaagtgcaccgccggaaacaaagtgtccaaagaaagcagcgtggaacccgtgtcttgccccgagaaaggcctggacattccttggctgggacatctgctcgtgggactgtctggcgccttcggctttatcatcctggtgtacctgctgatcaactgccggaacacaggcccctggctgaagaaagtgctgaagtgcaacacccctgatccgagcaagttctttagccagctgagcagcgagcatggcggcgacgttcagaaatggctgtctagcccatttcctagcagcagcttcagccctggtggactggcccctgagattagccctctggaagtgctggaacgggacaaagtgacccagctgctcctgcagcaggataaggtgccagaacctgccagcctgtccagcaatcacagcctgaccagctgctttaccaaccagggctacttcttcttccatctgcctgacgctctggaaatcgaggcctgccaggtgtacttcacctacgatccctacagcgaagaggaccccgatgaaggtgttgccggtgctcctaccggaagctctcctcaacctctgcaaccactgagcggcgaggatgacgcctactgcacattccccagcagagatgacctgctgctgttcagcccttctctgctcggtggaccttctccaccttctacagcacctggcggatctggcgcaggcgaggaaagaatgcctcctagcctgcaagagagagtgcccagagactgggatcctcagcctctcggacctcctacaccaggcgtgccagacctggtggattttcagcctcctccagagctggtgctgagagaagctggcgaagaagtgccagacgccggacctagagagggcgttagctttccttggagcagacctcctggacagggcgagttcagagccctgaatgctagactgcccctgaacaccgatgcctacctgtctctgcaagagctgcagggacaagaccccacacatctggtggaacggaccatgcctagaatccccacactgaagaacctggaagatctggtcaccgagtaccacggcaacttcagtgcttggagtggcgtgtcaaaaggactggccgagagcctgcagcctgactactctgagagactgtgcctggtgtctgagatccctcctaaaggcggagcccttggagaaggacctggcgcctctccatgtaaccagcacagcccttattgggcccctccttgctacactctgaagcccgagacaagagtgaagttcagcagaagcgccgacgctcccgcctataagcagggacagaaccagctgtacaacgagctgaatctggggcgcagagaagagtacgatgtgctggacaagcggagaggcagagatcctgagatgggcggcaagcccagacggaagaatcctcaagagggcctgtataatgagctgcagaaagacaagatggccgaggcctactccgagatcggaatgaagggcgagcgcagaagaggcaagggacacgatggactgtatcagggcctgagcaccgccaccaaggatacctatgatgccctgcacatgcaggccctgcctccaaga

SEQ ID NO: 206 - DNA, 1812 bp, Artificial Sequence
  CSR 822BG
atggctctgcctgtgacagctctgctgctgcctctggctctgcttctgcatgccgccagacctaaagagatcacaaacgccctggaaacctggggagccctcggccaggatattaacctggacatccccagcttccagatgagcgacgacatcgatgacatcaagtgggagaaaaccagcgacaagaagaagatcgcccagttccggaaagagaaagagacattcaaagagaaggacacctacaagctgttcaagaacggcaccctgaagatcaagcacctgaaaaccgacgaccaggacatctataaggtgtccatctaccacaccaagggcaagaacgtgctggaaaagatcttcgacctcaagatccaagagcgggtgtccaagcctaagatcagctggacctgcatcaacaccacactgacctgcgaagtgatgaacggcacagaccccgagctgaacctgtaccaggatggcaaacacctgaagctgagccagcgcgtgatcacccacaagtggacaacaagcctgagcgccaagttcaagtgcaccgccggaaacaaagtgtccaaagaaagcagcgtggaacccgtgtcttgccccgagaaaggactggacatctacctgatcatcggcatctgtggcggcggaagcctgctgatggtgtttgttgccctgctggtgttctacatcaccaactgcagaaacacaggcccctggctgaagaaagtgctgaagtgcaacacccctgatccgagcaagttctttagccagctgagcagcgagcatggcggcgacgttcagaaatggctgtctagcccatttcctagcagcagcttcagccctggtggactggcccctgagattagccctctggaagtgctggaacgggacaaagtgacccagctgctcctgcagcaggataaggtgccagaacctgccagcctgtccagcaatcacagcctgaccagctgctttaccaaccagggctacttcttcttccatctgcctgacgctctggaaatcgaggcctgccaggtgtacttcacctacgatccctacagcgaagaggaccccgatgaaggtgttgccggtgctcctaccggaagctctcctcaacctctgcaaccactgagcggcgaggatgacgcctactgcacattccccagcagagatgacctgctgctgttcagcccttctctgctcggtggaccttctccaccttctacagcacctggcggatctggcgcaggcgaggaaagaatgcctcctagcctgcaagagagagtgcccagagactgggatcctcagcctctcggacctcctacaccaggcgtgccagacctggtggattttcagcctcctccagagctggtgctgagagaagctggcgaagaagtgccagacgccggacctagagagggcgttagctttccttggagcagacctcctggacagggcgagttcagagccctgaatgctagactgcccctgaacaccgatgcctacctgtctctgcaagagctgcagggacaagaccccacacatctggtggaacggaccatgcctagaatccccacactgaagaacctggaagatctggtcaccgagtaccacggcaacttcagtgcttggagtggcgtgtcaaaaggcctggccgaaagcctgcagcctgactactctgagagactgtgcctggtgtctgagatccctcctaaaggcggagcccttggagaaggacctggcgcctctccatgtaaccagcacagcccttattgggcccctccttgctacactctgaagcccgagaca

SEQ ID NO: 207 - DNA, 2148 bp, Artificial Sequence
  CSR 822BGz
atggctctgcctgtgacagctctgctgctgcctctggctctgcttctgcatgccgccagacctaaagagatcacaaacgccctggaaacctggggagccctcggccaggatattaacctggacatccccagcttccagatgagcgacgacatcgatgacatcaagtgggagaaaaccagcgacaagaagaagatcgcccagttccggaaagagaaagagacattcaaagagaaggacacctacaagctgttcaagaacggcaccctgaagatcaagcacctgaaaaccgacgaccaggacatctataaggtgtccatctaccacaccaagggcaagaacgtgctggaaaagatcttcgacctcaagatccaagagcgggtgtccaagcctaagatcagctggacctgcatcaacaccacactgacctgcgaagtgatgaacggcacagaccccgagctgaacctgtaccaggatggcaaacacctgaagctgagccagcgcgtgatcacccacaagtggacaacaagcctgagcgccaagttcaagtgcaccgccggaaacaaagtgtccaaagaaagcagcgtggaacccgtgtcttgccccgagaaaggactggacatctacctgatcatcggcatctgtggcggcggaagcctgctgatggtgtttgttgccctgctggtgttctacatcaccaactgcagaaacacaggcccctggctgaagaaagtgctgaagtgcaacacccctgatccgagcaagttctttagccagctgagcagcgagcatggcggcgacgttcagaaatggctgtctagcccatttcctagcagcagcttcagccctggtggactggcccctgagattagccctctggaagtgctggaacgggacaaagtgacccagctgctcctgcagcaggataaggtgccagaacctgccagcctgtccagcaatcacagcctgaccagctgctttaccaaccagggctacttcttcttccatctgcctgacgctctggaaatcgaggcctgccaggtgtacttcacctacgatccctacagcgaagaggaccccgatgaaggtgttgccggtgctcctaccggaagctctcctcaacctctgcaaccactgagcggcgaggatgacgcctactgcacattccccagcagagatgacctgctgctgttcagcccttctctgctcggtggaccttctccaccttctacagcacctggcggatctggcgcaggcgaggaaagaatgcctcctagcctgcaagagagagtgcccagagactgggatcctcagcctctcggacctcctacaccaggcgtgccagacctggtggattttcagcctcctccagagctggtgctgagagaagctggcgaagaagtgccagacgccggacctagagagggcgttagctttccttggagcagacctcctggacagggcgagttcagagccctgaatgctagactgcccctgaacaccgatgcctacctgtctctgcaagagctgcagggacaagaccccacacatctggtggaacggaccatgcctagaatccccacactgaagaacctggaagatctggtcaccgagtaccacggcaacttcagtgcttggagtggcgtgtcaaaaggcctggccgaaagcctgcagcctgactactctgagagactgtgcctggtgtctgagatccctcctaaaggcggagcccttggagaaggacctggcgcctctccatgtaaccagcacagcccttattgggcccctccttgctacactctgaagcccgagacaagagtgaagttcagcagaagcgccgacgctcccgcctataagcagggacagaaccagctgtacaacgagctgaatctggggcgcagagaagagtacgatgtgctggacaagcggagaggcagagatcctgagatgggcggcaagcccagacggaagaatcctcaagagggcctgtataatgagctgcagaaagacaagatggccgaggcctactccgagatcggaatgaagggcgagcgcagaagaggcaagggacacgatggactgtatcagggcctgagcaccgccaccaaggatacctatgatgccctgcacatgcaggccctgcctccaaga

SEQ ID NO: 208 - DNA, 1800 bp, Artificial Sequence
  CSR 82GGB
atggctctgcctgtgacagctctgctgctgcctctggctctgcttctgcatgccgccagacctaaagagatcacaaacgccctggaaacctggggagccctcggccaggatattaacctggacatccccagcttccagatgagcgacgacatcgatgacatcaagtgggagaaaaccagcgacaagaagaagatcgcccagttccggaaagagaaagagacattcaaagagaaggacacctacaagctgttcaagaacggcaccctgaagatcaagcacctgaaaaccgacgaccaggacatctataaggtgtccatctaccacaccaagggcaagaacgtgctggaaaagatcttcgacctcaagatccaagagcgggtgtccaagcctaagatcagctggacctgcatcaacaccacactgacctgcgaagtgatgaacggcacagaccccgagctgaacctgtaccaggatggcaaacacctgaagctgagccagcgcgtgatcacccacaagtggacaacaagcctgagcgccaagttcaagtgcaccgccggaaacaaagtgtccaaagaaagcagcgtggaacccgtgtcttgccccgagaaaggactggatgccgtggtcatcagcgtgggctctatgggcctgatcatcagcctgctgtgcgtgtacttctggctggaacggaccatgcctcggatccccacactgaagaacctggaagatctggtcaccgagtaccacggcaacttctctgcttggagtggcgtgtcaaaaggcctggccgaaagcctgcagcctgactactctgagagactgtgcctggtgtctgagatccctcctaaaggcggagcccttggagaaggacctggcgcctctccatgtaaccagcacagcccttattgggcccctccttgctacactctgaagcccgagacaaactgccggaacacaggcccctggctgaagaaagtgctgaagtgcaacacccctgatccgagcaagttctttagccagctgagcagcgagcatggcggcgacgttcagaaatggctgtctagcccatttcctagcagcagcttcagccctggtggactggcccctgagattagccctctggaagtgctcgagcgggacaaagtgacacagctgctcctccagcaggacaaggtgccagaacctgccagcctgtccagcaatcacagcctgaccagctgctttaccaaccagggctacttcttcttccatctgcctgacgctctggaaatcgaggcctgccaggtgtacttcacctacgatccctacagcgaagaggaccccgatgaaggtgttgccggtgctcctaccggaagctctcctcaacctctgcaaccactgagcggcgaggatgacgcctactgcacattccccagcagagatgacctgctgctgttcagccctagcctgctcggaggaccttctccaccatctacagctccaggtggaagcggagccggcgaggaaagaatgcctccaagcctgcaagagagagtgcccagagactgggatcctcagcctctcggacctcctacaccaggcgtgccagacctggtggattttcagcctcctccagagctggtgctgagagaagctggcgaagaagtgccagacgccggacctagagagggcgttagctttccttggagcagacctcctggacagggcgagttcagagccctgaatgctagactgcccctgaacaccgatgcctacctgtctctgcaagagctgcagggacaagaccccacacacctggtg

SEQ ID NO: 209 - DNA, 2136 bp, Artificial Sequence
  CSR 82GGBz
atggctctgcctgtgacagctctgctgctgcctctggctctgcttctgcatgccgccagacctaaagagatcacaaacgccctggaaacctggggagccctcggccaggatattaacctggacatccccagcttccagatgagcgacgacatcgatgacatcaagtgggagaaaaccagcgacaagaagaagatcgcccagttccggaaagagaaagagacattcaaagagaaggacacctacaagctgttcaagaacggcaccctgaagatcaagcacctgaaaaccgacgaccaggacatctataaggtgtccatctaccacaccaagggcaagaacgtgctggaaaagatcttcgacctcaagatccaagagcgggtgtccaagcctaagatcagctggacctgcatcaacaccacactgacctgcgaagtgatgaacggcacagaccccgagctgaacctgtaccaggatggcaaacacctgaagctgagccagcgcgtgatcacccacaagtggacaacaagcctgagcgccaagttcaagtgcaccgccggaaacaaagtgtccaaagaaagcagcgtggaacccgtgtcttgccccgagaaaggactggatgccgtggtcatcagcgtgggctctatgggcctgatcatcagcctgctgtgcgtgtacttctggctggaacggaccatgcctcggatccccacactgaagaacctggaagatctggtcaccgagtaccacggcaacttctctgcttggagtggcgtgtcaaaaggcctggccgaaagcctgcagcctgactactctgagagactgtgcctggtgtctgagatccctcctaaaggcggagcccttggagaaggacctggcgcctctccatgtaaccagcacagcccttattgggcccctccttgctacactctgaagcccgagacaaactgccggaacacaggcccctggctgaagaaagtgctgaagtgcaacacccctgatccgagcaagttctttagccagctgagcagcgagcatggcggcgacgttcagaaatggctgtctagcccatttcctagcagcagcttcagccctggtggactggcccctgagattagccctctggaagtgctcgagcgggacaaagtgacacagctgctcctccagcaggacaaggtgccagaacctgccagcctgtccagcaatcacagcctgaccagctgctttaccaaccagggctacttcttcttccatctgcctgacgctctggaaatcgaggcctgccaggtgtacttcacctacgatccctacagcgaagaggaccccgatgaaggtgttgccggtgctcctaccggaagctctcctcaacctctgcaaccactgagcggcgaggatgacgcctactgcacattccccagcagagatgacctgctgctgttcagccctagcctgctcggaggaccttctccaccatctacagctccaggtggaagcggagccggcgaggaaagaatgcctccaagcctgcaagagagagtgcccagagactgggatcctcagcctctcggacctcctacaccaggcgtgccagacctggtggattttcagcctcctccagagctggtgctgagagaagctggcgaagaagtgccagacgccggacctagagagggcgttagctttccttggagcagacctcctggacagggcgagttcagagccctgaatgctagactgcccctgaacaccgatgcctacctgtctctgcaagagctgcagggacaagaccccacacacctcgtcagagtgaagttcagcagaagcgccgacgctcccgcctataagcagggacagaaccagctgtacaacgagctgaatctggggcgcagagaagagtacgatgtgctggacaagcggagaggcagagatcctgagatgggcggcaagcccagacggaagaatcctcaagagggcctgtataatgagctgcagaaagacaagatggccgaggcctactccgagatcggaatgaagggcgagcgcagaagaggcaagggacacgatggactgtatcagggcctgagcaccgccaccaaggatacctatgatgccctgcacatgcaggccctgccacctaga

SEQ ID NO: 210 - DNA, 1812 bp, Artificial Sequence
  CSR 822GB
atggctctgcctgtgacagctctgctgctgcctctggctctgcttctgcatgccgccagacctaaagagatcacaaacgccctggaaacctggggagccctcggccaggatattaacctggacatccccagcttccagatgagcgacgacatcgatgacatcaagtgggagaaaaccagcgacaagaagaagatcgcccagttccggaaagagaaagagacattcaaagagaaggacacctacaagctgttcaagaacggcaccctgaagatcaagcacctgaaaaccgacgaccaggacatctataaggtgtccatctaccacaccaagggcaagaacgtgctggaaaagatcttcgacctcaagatccaagagcgggtgtccaagcctaagatcagctggacctgcatcaacaccacactgacctgcgaagtgatgaacggcacagaccccgagctgaacctgtaccaggatggcaaacacctgaagctgagccagcgcgtgatcacccacaagtggacaacaagcctgagcgccaagttcaagtgcaccgccggaaacaaagtgtccaaagaaagcagcgtggaacccgtgtcttgccccgagaaaggactggacatctacctgatcatcggcatctgtggcggcggaagcctgctgatggtgtttgttgccctgctggtgttctacatcaccgagcggaccatgcctcggatccccacactgaagaacctggaagatctggtcaccgagtaccacggcaacttctctgcttggagtggcgtgtcaaaaggcctggccgaaagcctgcagcctgactactctgagagactgtgcctggtgtctgagatccctcctaaaggcggagcccttggagaaggacctggcgcctctccatgtaaccagcacagcccttattgggcccctccttgctacactctgaagcccgagacaaactgccggaacacaggcccctggctgaagaaagtgctgaagtgcaacacccctgatccgagcaagttctttagccagctgagcagcgagcatggcggcgacgttcagaaatggctgtctagcccatttcctagcagcagcttcagccctggtggactggcccctgagattagccctctggaagtgctggaacgggacaaagtgacccagctgctcctgcagcaggataaggtgccagaacctgccagcctgtccagcaatcacagcctgaccagctgctttaccaaccagggctacttcttcttccatctgcctgacgctctggaaatcgaggcctgccaggtgtacttcacctacgatccctacagcgaagaggaccccgatgaaggtgttgccggtgctcctaccggaagctctcctcaacctctgcaaccactgagcggcgaggatgacgcctactgcacattccccagcagagatgacctgctgctgttcagccctagcctgctcggaggaccttctccaccatctacagctccaggtggaagcggagccggcgaggaaagaatgcctccaagcctgcaagagagagtgcccagagactgggatcctcagcctctcggacctcctacaccaggcgtgccagacctggtggattttcagcctcctccagagctggtgctgagagaagctggcgaagaagtgccagacgccggacctagagagggcgttagctttccttggagcagacctcctggacagggcgagttcagagccctgaatgctagactgcccctgaacaccgatgcctacctgtctctgcaagagctgcagggacaagaccccacacacctggtg

SEQ ID NO: 211 - DNA, 2148 bp, Artificial Sequence
  CSR 822GBz
atggctctgcctgtgacagctctgctgctgcctctggctctgcttctgcatgccgccagacctaaagagatcacaaacgccctggaaacctggggagccctcggccaggatattaacctggacatccccagcttccagatgagcgacgacatcgatgacatcaagtgggagaaaaccagcgacaagaagaagatcgcccagttccggaaagagaaagagacattcaaagagaaggacacctacaagctgttcaagaacggcaccctgaagatcaagcacctgaaaaccgacgaccaggacatctataaggtgtccatctaccacaccaagggcaagaacgtgctggaaaagatcttcgacctcaagatccaagagcgggtgtccaagcctaagatcagctggacctgcatcaacaccacactgacctgcgaagtgatgaacggcacagaccccgagctgaacctgtaccaggatggcaaacacctgaagctgagccagcgcgtgatcacccacaagtggacaacaagcctgagcgccaagttcaagtgcaccgccggaaacaaagtgtccaaagaaagcagcgtggaacccgtgtcttgccccgagaaaggactggacatctacctgatcatcggcatctgtggcggcggaagcctgctgatggtgtttgttgccctgctggtgttctacatcaccgagcggaccatgcctcggatccccacactgaagaacctggaagatctggtcaccgagtaccacggcaacttctctgcttggagtggcgtgtcaaaaggcctggccgaaagcctgcagcctgactactctgagagactgtgcctggtgtctgagatccctcctaaaggcggagcccttggagaaggacctggcgcctctccatgtaaccagcacagcccttattgggcccctccttgctacactctgaagcccgagacaaactgccggaacacaggcccctggctgaagaaagtgctgaagtgcaacacccctgatccgagcaagttctttagccagctgagcagcgagcatggcggcgacgttcagaaatggctgtctagcccatttcctagcagcagcttcagccctggtggactggcccctgagattagccctctggaagtgctggaacgggacaaagtgacccagctgctcctgcagcaggataaggtgccagaacctgccagcctgtccagcaatcacagcctgaccagctgctttaccaaccagggctacttcttcttccatctgcctgacgctctggaaatcgaggcctgccaggtgtacttcacctacgatccctacagcgaagaggaccccgatgaaggtgttgccggtgctcctaccggaagctctcctcaacctctgcaaccactgagcggcgaggatgacgcctactgcacattccccagcagagatgacctgctgctgttcagccctagcctgctcggaggaccttctccaccatctacagctccaggtggaagcggagccggcgaggaaagaatgcctccaagcctgcaagagagagtgcccagagactgggatcctcagcctctcggacctcctacaccaggcgtgccagacctggtggattttcagcctcctccagagctggtgctgagagaagctggcgaagaagtgccagacgccggacctagagagggcgttagctttccttggagcagacctcctggacagggcgagttcagagccctgaatgctagactgcccctgaacaccgatgcctacctgtctctgcaagagctgcagggacaagaccccacacacctcgtcagagtgaagttcagcagaagcgccgacgctcccgcctataagcagggacagaaccagctgtacaacgagctgaatctggggcgcagagaagagtacgatgtgctggacaagcggagaggcagagatcctgagatgggcggcaagcccagacggaagaatcctcaagagggcctgtataatgagctgcagaaagacaagatggccgaggcctactccgagatcggaatgaagggcgagcgcagaagaggcaagggacacgatggactgtatcagggcctgagcaccgccaccaaggatacctatgatgccctgcacatgcaggccctgccacctaga

SEQ ID NO: 212 - protein, 112 aa, Homo sapiens; identical to SEQ ID NO: 5

SEQ ID NO: 213 - DNA, 336 bp, Homo sapiens
cgcgtgaagtttagtcgatcagcagatgccccagcttacaaacagggacagaaccagctgtataacgagctgaatctgggccgccgagaggaatatgacgtgctggataagcggagaggacgcgaccccgaaatgggaggcaagcccaggcgcaaaaaccctcaggaaggcctgtataacgagctgcagaaggacaaaatggcagaagcctattctgagatcggcatgaagggggagcgacggagaggcaaagggcacgatgggctgtaccagggactgagcaccgccacaaaggacacctatgatgctctgcatatgcaggcactgcctccaagg

SEQ ID NO: 214 - protein, 42 aa, Homo sapiens; identical to SEQ ID NO: 119

SEQ ID NO: 215 - DNA, 126 bp, Homo sapiens
aagagaggcaggaagaaactgctgtatattttcaaacagcccttcatgcgccccgtgcagactacccaggaggaagacgggtgctcctgtcgattccctgaggaagaggaaggcgggtgtgagctg

SEQ ID NO: 216 - protein, 45 aa, Homo sapiens
TTTPAPRPPTPAPTIASQPLSLRPEACRPAAGGAVHTRGLDFACD

SEQ ID NO: 217 - DNA, 135 bp, Homo sapiens
actaccacaccagcacctagaccaccaactccagctccaaccatcgcgagtcagcccctgagtctgagacctgaggcctgcaggccagctgcaggaggagctgtgcacaccaggggcctggacttcgcctgcgac

SEQ ID NO: 218 - protein, 1053 aa, Staphylococcus aureus
MKRNYILGLDIGITSVGYGIIDYETRDVIDAGVRLFKEANVENNEGRRSKRGARRLKRRRRHRIQRVKKLLFDYNLLTDHSELSGINPYEARVKGLSQKLSEEEFSAALLHLAKRRGVHNVNEVEEDTGNELSTKEQISRNSKALEEKYVAELQLERLKKDGEVRGSINRFKTSDYVKEAKQLLKVQKAYHQLDQSFIDTYIDLLETRRTYYEGPGEGSPFGWKDIKEWYEMLMGHCTYFPEELRSVKYAYNADLYNALNDLNNLVITRDENEKLEYYEKFQIIENVFKQKKKPTLKQIAKEILVNEEDIKGYRVTSTGKPEFTNLKVYHDIKDITARKEIIENAELLDQIAKILTIYQSSEDIQEELTNLNSELTQEEIEQISNLKGYTGTHNLSLKAINLILDELWHTNDNQIAIFNRLKLVPKKVDLSQQKEIPTTLVDDFILSPVVKRSFIQSIKVINAIIKKYGLPNDIIIELAREKNSKDAQKMINEMQKRNRQTNERIEEIIRTTGKENAKYLIEKIKLHDMQEGKCLYSLEAIPLEDLLNNPFNYEVDHIIPRSVSFDNSFNNKVLVKQEENSKKGNRTPFQYLSSSDSKISYETFKKHILNLAKGKGRISKTKKEYLLEERDINRFSVQKDFINRNLVDTRYATRGLMNLLRSYFRVNNLDVKVKSINGGFTSFLRRKWKFKKERNKGYKHHAEDALIIANADFIFKEWKKLDKAKKVMENQMFEEKQAESMPEIETEQEYKEIFITPHQIKHIKDFKDYKYSHRVDKKPNRELINDTLYSTRKDDKGNTLIVNNLNGLYDKDNDKLKKLINKSPEKLLMYHHDPQTYQKLKLIMEQYGDEKNPLYKYYEETGNYLTKYSKKDNGPVIKKIKYYGNKLNAHLDITDDYPNSRNKVVKLSLKPYRFDVYLDNGVYKFVTVKNLDVIKKENYYEVNSKCYEEAKKLKKISNQAEFIASFYNNDLIKINGELYRVIGVNNDLLNRIEVNMIDITYREYLENMNDKRPPRIIKTIASKTQSIKKYSTDILGNLYEVKSKKHPQIIKKG

SEQ ID NO: 219 - protein, 1053 aa, Artificial Sequence
  dSaCas9
MKRNYILGLAIGITSVGYGIIDYETRDVIDAGVRLFKEANVENNEGRRSKRGARRLKRRRRHRIQRVKKLLFDYNLLTDHSELSGINPYEARVKGLSQKLSEEEFSAALLHLAKRRGVHNVNEVEEDTGNELSTKEQISRNSKALEEKYVAELQLERLKKDGEVRGSINRFKTSDYVKEAKQLLKVQKAYHQLDQSFIDTYIDLLETRRTYYEGPGEGSPFGWKDIKEWYEMLMGHCTYFPEELRSVKYAYNADLYNALNDLNNLVITRDENEKLEYYEKFQIIENVFKQKKKPTLKQIAKEILVNEEDIKGYRVTSTGKPEFTNLKVYHDIKDITARKEIIENAELLDQIAKILTIYQSSEDIQEELTNLNSELTQEEIEQISNLKGYTGTHNLSLKAINLILDELWHTNDNQIAIFNRLKLVPKKVDLSQQKEIPTTLVDDFILSPVVKRSFIQSIKVINAIIKKYGLPNDIIIELAREKNSKDAQKMINEMQKRNRQTNERIEEIIRTTGKENAKYLIEKIKLHDMQEGKCLYSLEAIPLEDLLNNPFNYEVDHIIPRSVSFDNSFNNKVLVKQEEASKKGNRTPFQYLSSSDSKISYETFKKHILNLAKGKGRISKTKKEYLLEERDINRFSVQKDFINRNLVDTRYATRGLMNLLRSYFRVNNLDVKVKSINGGFTSFLRRKWKFKKERNKGYKHHAEDALIIANADFIFKEWKKLDKAKKVMENQMFEEKQAESMPEIETEQEYKEIFITPHQIKHIKDFKDYKYSHRVDKKPNRELINDTLYSTRKDDKGNTLIVNNLNGLYDKDNDKLKKLINKSPEKLLMYHHDPQTYQKLKLIMEQYGDEKNPLYKYYEETGNYLTKYSKKDNGPVIKKIKYYGNKLNAHLDITDDYPNSRNKVVKLSLKPYRFDVYLDNGVYKFVTVKNLDVIKKENYYEVNSKCYEEAKKLKKISNQAEFIASFYNNDLIKINGELYRVIGVNNDLLNRIEVNMIDITYREYLENMNDKRPPRIIKTIASKTQSIKKYSTDILGNLYEVKSKKHPQIIKKG

SEQ ID NO: 220 - protein, 1368 aa, Staphylococcus pyogenes
  misc_feature (1)..(1): Xaa can be any naturally occurring amino acid
XDKKYSIGLAIGTNSVGWAVITDEYKVPSKKFKVLGNTDRHSIKKNLIGALLFDSGETAEATRLKRTARRRYTRRKNRICYLQEIFSNEMAKVDDSFFHRLEESFLVEEDKKHERHPIFGNIVDEVAYHEKYPTIYHLRKKLVDSTDKADLRLIYLALAHMIKFRGHFLIEGDLNPDNSDVDKLFIQLVQTYNQLFEENPINASGVDAKAILSARLSKSRRLENLIAQLPGEKKNGLFGNLIALSLGLTPNFKSNFDLAEDAKLQLSKDTYDDDLDNLLAQIGDQYADLFLAAKNLSDAILLSDILRVNTEITKAPLSASMIKRYDEHHQDLTLLKALVRQQLPEKYKEIFFDQSKNGYAGYIDGGASQEEFYKFIKPILEKMDGTEELLVKLNREDLLRKQRTFDNGSIPHQIHLGELHAILRRQEDFYPFLKDNREKIEKILTFRIPYYVGPLARGNSRFAWMTRKSEETITPWNFEEVVDKGASAQSFIERMTNFDKNLPNEKVLPKHSLLYEYFTVYNELTKVKYVTEGMRKPAFLSGEQKKAIVDLLFKTNRKVTVKQLKEDYFKKIECFDSVEISGVEDRFNASLGTYHDLLKIIKDKDFLDNEENEDILEDIVLTLTLFEDREMIEERLKTYAHLFDDKVMKQLKRRRYTGWGRLSRKLINGIRDKQSGKTILDFLKSDGFANRNFMQLIHDDSLTFKEDIQKAQVSGQGDSLHEHIANLAGSPAIKKGILQTVKVVDELVKVMGRHKPENIVIEMARENQTTQKGQKNSRERMKRIEEGIKELGSQILKEHPVENTQLQNEKLYLYYLQNGRDMYVDQELDINRLSDYDVDAIVPQSFLKDDSIDNKVLTRSDKNRGKSDNVPSEEVVKKMKNYWRQLLNAKLITQRKFDNLTKAERGGLSELDKAGFIKRQLVETRQITKHVAQILDSRMNTKYDENDKLIREVKVITLKSKLVSDFRKDFQFYKVREINNYHHAHDAYLNAVVGTALIKKYPKLESEFVYGDYKVYDVRKMIAKSEQEIGKATAKYFFYSNIMNFFKTEITLANGEIRKRPLIETNGETGEIVWDKGRDFATVRKVLSMPQVNIVKKTEVQTGGFSKESILPKRNSDKLIARKKDWDPKKYGGFDSPTVAYSVLVVAKVEKGKSKKLKSVKELLGITIMERSSFEKNPIDFLEAKGYKEVKKDLIIKLPKYSLFELENGRKRMLASAGELQKGNELALPSKYVNFLYLASHYEKLKGSPEDNEQKQLFVEQHKHYLDEIIEQISEFSKRVILADANLDKVLSAYNKHRDKPIREQAENIIHLFTLTNLGAPAAFKYFDTTIDRKRYTSTKEVLDATLIHQSITGLYETRIDLSQLGGD

SEQ ID NO: 221 - protein, 1368 aa, Artificial Sequence
  dCas9
MDKKYSIGLAIGTNSVGWAVITDEYKVPSKKFKVLGNTDRHSIKKNLIGALLFDSGETAEATRLKRTARRRYTRRKNRICYLQEIFSNEMAKVDDSFFHRLEESFLVEEDKKHERHPIFGNIVDEVAYHEKYPTIYHLRKKLVDSTDKADLRLIYLALAHMIKFRGHFLIEGDLNPDNSDVDKLFIQLVQTYNQLFEENPINASGVDAKAILSARLSKSRRLENLIAQLPGEKKNGLFGNLIALSLGLTPNFKSNFDLAEDAKLQLSKDTYDDDLDNLLAQIGDQYADLFLAAKNLSDAILLSDILRVNTEITKAPLSASMIKRYDEHHQDLTLLKALVRQQLPEKYKEIFFDQSKNGYAGYIDGGASQEEFYKFIKPILEKMDGTEELLVKLNREDLLRKQRTFDNGSIPHQIHLGELHAILRRQEDFYPFLKDNREKIEKILTFRIPYYVGPLARGNSRFAWMTRKSEETITPWNFEEVVDKGASAQSFIERMTNFDKNLPNEKVLPKHSLLYEYFTVYNELTKVKYVTEGMRKPAFLSGEQKKAIVDLLFKTNRKVTVKQLKEDYFKKIECFDSVEISGVEDRFNASLGTYHDLLKIIKDKDFLDNEENEDILEDIVLTLTLFEDREMIEERLKTYAHLFDDKVMKQLKRRRYTGWGRLSRKLINGIRDKQSGKTILDFLKSDGFANRNFMQLIHDDSLTFKEDIQKAQVSGQGDSLHEHIANLAGSPAIKKGILQTVKVVDELVKVMGRHKPENIVIEMARENQTTQKGQKNSRERMKRIEEGIKELGSQILKEHPVENTQLQNEKLYLYYLQNGRDMYVDQELDINRLSDYDVDAIVPQSFLKDDSIDNKVLTRSDKNRGKSDNVPSEEVVKKMKNYWRQLLNAKLITQRKFDNLTKAERGGLSELDKAGFIKRQLVETRQITKHVAQILDSRMNTKYDENDKLIREVKVITLKSKLVSDFRKDFQFYKVREINNYHHAHDAYLNAVVGTALIKKYPKLESEFVYGDYKVYDVRKMIAKSEQEIGKATAKYFFYSNIMNFFKTEITLANGEIRKRPLIETNGETGEIVWDKGRDFATVRKVLSMPQVNIVKKTEVQTGGFSKESILPKRNSDKLIARKKDWDPKKYGGFDSPTVAYSVLVVAKVEKGKSKKLKSVKELLGITIMERSSFEKNPIDFLEAKGYKEVKKDLIIKLPKYSLFELENGRKRMLASAGELQKGNELALPSKYVNFLYLASHYEKLKGSPEDNEQKQLFVEQHKHYLDEIIEQISEFSKRVILADANLDKVLSAYNKHRDKPIREQAENIIHLFTLTNLGAPAAFKYFDTTIDRKRYTSTKEVLDATLIHQSITGLYETRIDLSQLGGD

SEQ ID NO: 222 - protein, 199 aa, Artificial Sequence
  Clo051
EGIKSNISLLKDELRGQISHISHEYLSLIDLAFDSKQNRLFEMKVLELLVNEYGFKGRHLGGSRKPDGIVYSTTLEDNFGIIVDTKAYSEGYSLPISQADEMERYVRENSNRDEEVNPNKWWENFSEEVKKYYFVFISGSFKGKFEEQLRRLSMTTGVNGSAVNVVNLLLGAEKIRSGEMTIEELERAMFNNSEFILKY

SEQ ID NO: 223 - protein, 1591 aa, Artificial Sequence; identical to SEQ ID NO: 76
  dCas9-Clo051

SEQ ID NO: 224 - DNA, 4776 bp, Artificial Sequence; identical to SEQ ID NO: 77
  dCas9-Clo051

SEQ ID NO: 225 - protein, 1588 aa, Artificial Sequence; identical to SEQ ID NO: 78
  dCas9-Clo051

SEQ ID NO: 226 - DNA, 4767 bp, Artificial Sequence; identical to SEQ ID NO: 79
  dCas9-Clo051

SEQ ID NO: 227 - protein, 187 aa, Artificial Sequence; identical to SEQ ID NO: 75
  DHFR mutein

SEQ ID NO: 228 - DNA, 561 bp, Artificial Sequence
  DHFR mutein
atggtcgggtctctgaattgtatcgtcgccgtgagtcagaacatgggcattgggaagaatggcgatttcccatggccacctctgcgcaacgagtcccgatactttcagcggatgacaactacctcctctgtggaagggaaacagaatctggtcatcatgggaaagaaaacttggttcagcattccagagaagaaccggcccctgaaaggcagaatcaatctggtgctgtcccgagaactgaaggagccaccacagggagctcactttctgagccggtccctggacgatgcactgaagctgacagaacagcctgagctggccaacaaagtcgatatggtgtggatcgtcgggggaagttcagtgtataaggaggccatgaatcaccccggccatctgaaactgttcgtcacacggatcatgcaggactttgagagcgatactttctttcctgaaattgacctggagaagtacaaactgctgcccgaatatcctggcgtgctgtccgatgtccaggaagagaaaggcatcaaatacaagttcgaggtctatgagaagaatgac

SEQ ID NO: 229 - DNA, 561 bp, Artificial Sequence
  DHFR
atggtcggaagcctgaactgcatcgtggccgtgtctcagaacatgggcatcggcaagaacggcgacttcccttggcctcctctgagaaacgagagccgctacttccagcggatgaccaccacaagctccgtggaaggcaagcagaacctcgtgatcatgggcaagaaaacctggttcagcatccctgagaagaacagacccctgaagggcagaatcaacctggtgctgagcagagagctgaaagagcctcctcaaggcgcccacttcctgagcagatctctggacgatgccctgaagctgaccgagcagccagaactggccaacaaagtggacatggtctggatcgtcggcggcagctccgtgtacaaagaagccatgaatcaccccggccacctgaaactgttcgtgaccagaatcatgcaggacttcgagagcgacacattcttcccggagatcgacctggaaaagtacaaactgctgcctgagtaccccggcgtgctgagcgacgtgcaagaggaaaagggcatcaagtacaagttcgaggtgtacgagaagaacgac

SEQ ID NO: 230 - protein, 18 aa, Homo Sapiens
EGRGSLLTCGDVEENPGP

SEQ ID NO: 231 - protein, 21 aa, Homo Sapiens
GSGEGRGSLLTCGDVEENPGP

SEQ ID NO: 232 - DNA, 63 bp, Homo Sapiens
ggatctggagagggaaggggaagcctgctgacctgtggagacgtggaggaaaacccaggacca

SEQ ID NO: 233 - protein, 20 aa, Homo Sapiens
QCTNYALLKLAGDVESNPGP

SEQ ID NO: 234 - protein, 23 aa, Homo Sapiens
GSGQCTNYALLKLAGDVESNPGP

SEQ ID NO: 235 - protein, 22 aa, Homo Sapiens
VKQTLNFDLLKLAGDVESNPGP

SEQ ID NO: 236 - protein, 25 aa, Homo Sapiens
GSGVKQTLNFDLLKLAGDVESNPGP

SEQ ID NO: 237 - protein, 19 aa, Homo Sapiens
ATNFSLLKQAGDVEENPGP

SEQ ID NO: 238 - protein, 22 aa, Homo Sapiens
GSGATNFSLLKQAGDVEENPGP

SEQ ID NO: 239 - protein, 594 aa, Artificial Sequence
  PB transposase
MGSSLDDEHILSALLQSDDELVGEDSDSEISDHVSEDDVQSDTEEAFIDEVHEVQPTSSGSEILDEQNVIEQPGSSLASNRILTLPQRTIRGKNKHCWSTSKSTRRSRVSALNIVRSQRGPTRMCRNIYDPLLCFKLFFTDEIISEIVKWTNAEISLKRRESMTGATFRDTNEDEIYAFFGILVMTAVRKDNHMSTDDLFDRSLSMVYVSVMSRDRFDFLIRCLRMDDKSIRPTLRENDVFTPVRKIWDLFIHQCIQNYTPGAHLTIDEQLLGFRGRCPFRMYIPNKPSKYGIKILMMCDSGYKYMINGMPYLGRGTQTNGVPLGEYYVKELSKPVHGSCRNITCDNWFTSIPLAKNLLQEPYKLTIVGTVRSNKREIPEVLKNSRSRPVGTSMFCFDGPLTLVSYKPKPAKMVYLLSSCDEDASINESTGKPQMVMYYNQTKGGVDTLDQMCSVMTCSRKTNRWPMALLYGMINIACINSFIIYSHNVSSKGEKVQSRKKFMRNLYMSLTSSFMRKRLEAPTLKRYLRDNISNILPNEVPGTSDDSTEEPVMKKRTYCTYCPSKIRRKANASCKKCKKVICREHNIDMCQSCF

SEQ ID NO: 240 - protein, 594 aa, Artificial Sequence
  SPB transposase
MGSSLDDEHILSALLQSDDELVGEDSDSEVSDHVSEDDVQSDTEEAFIDEVHEVQPTSSGSEILDEQNVIEQPGSSLASNRILTLPQRTIRGKNKHCWSTSKSTRRSRVSALNIVRSQRGPTRMCRNIYDPLLCFKLFFTDEIISEIVKWTNAEISLKRRESMTSATFRDTNEDEIYAFFGILVMTAVRKDNHMSTDDLFDRSLSMVYVSVMSRDRFDFLIRCLRMDDKSIRPTLRENDVFTPVRKIWDLFIHQCIQNYTPGAHLTIDEQLLGFRGRCPFRVYIPNKPSKYGIKILMMCDSGTKYMINGMPYLGRGTQTNGVPLGEYYVKELSKPVHGSCRNITCDNWFTSIPLAKNLLQEPYKLTIVGTVRSNKREIPEVLKNSRSRPVGTSMFCFDGPLTLVSYKPKPAKMVYLLSSCDEDASINESTGKPQMVMYYNQTKGGVDTLDQMCSVMTCSRKTNRWPMALLYGMINIACINSFIIYSHNVSSKGEKVQSRKKFMRNLYMSLTSSFMRKRLEAPTLKRYLRDNISNILPKEVPGTSDDSTEEPVMKKRTYCTYCPSKIRRKANASCKKCKKVICREHNIDMCQSCF

SEQ ID NO: 241 - protein, 340 aa, Artificial Sequence
  SB100X transposase
MGKSKEISQDLRKKIVDLHKSGSSLGAISKRLKVPRSSVQTIVRKYKHHGTTQPSYRSGRRRVLSPRDERTLVRKVQINPRTTAKDLVKMLEETGTKVSISTVKRVLYRHNLKGRSARKKPLLQNRHKKARLRFATAHGDKDRTFWRNVLWSDETKIELFGHNDHRYVWRKKGEACKPKNTIPTVKHGGGSIMLWGCFAAGGTGALHKIDGIMRKENYVDILKQHLKTSVRKLKLGRKWVFQMDNDPKHTSKVVAKWLKDNKVKVLEWPSQSPDLNPIENLWAELKKRVRARRPTNLTQLHQLCQEEWAKIHPTYCGKLVEGYPKRLTQVKQFKGNATKY

SEQ ID NO: 242 - protein, 340 aa, Artificial Sequence
  hyperSB100X transposase
MGKSKEISQDLRKRIVDLHKSGSSLGAISKRLAVPRSSVQTIVRKYKHHGTTQPSYRSGRRRVLSPRDERTLVRKVQINPRTTAKDLVKMLEETGTKVSISTVKRVLYRHNLKGHSARKKPLLQNRHKKARLRFATAHGDKDRTFWRNVLWSDETKIELFGHNDHRYVWRKKGEACKPKNTIPTVKHGGGSIMLWGCFAAGGTGALHKIDGIMDAVQYVDILKQHLKTSVRKLKLGRKWVFQHDNDPKHTSKVVAKWLKDNKVKVLEWPSQSPDLNPIENLWAELKKRVRARRPTNLTQLHQLCQEEWAKIHPNYCGKLVEGYPKRLTQVKQFKGNATKY

SEQ ID NO: 243 - DNA, 5296 bp, Artificial Sequence
  Helraiser transposon
tcctatataataaaagagaaacatgcaaattgaccatccctccgctacgctcaagccacgcccaccagccaatcagaagtgactatgcaaattaacccaacaaagatggcagttaaatttgcatacgcaggtgtcaagcgccccaggaggcaacggcggccgcgggctcccaggaccttcgctggccccgggaggcgaggccggccgcgcctagccacacccgcgggctcccgggaccttcgccagcagagagcagagcgggagagcgggcggagagcgggaggtttggaggacttggcagagcaggaggccgctggacatagagcagagcgagagagagggtggcttggagggcgtggctccctctgtcaccccagcttcctcatcacagctgtggaaactgacagcagggaggaggaagtcccacccccacagaatcagccagaatcagccgttggtcagacagctctcagcggcctgacagccaggactctcattcacctgcatctcagaccgtgacagtagagaggtgggactatgtctaaagaacaactgttgatacaacgtagctctgcagccgaaagatgccggcgttatcgacagaaaatgtctgcagagcaacgtgcgtctgatcttgaaagaaggcggcgcctgcaacagaatgtatctgaagagcagctactggaaaaacgtcgctctgaagccgaaaaacagcggcgtcatcgacagaaaatgtctaaagaccaacgtgcctttgaagttgaaagaaggcggtggcgacgacagaatatgtctagagaacagtcatcaacaagtactaccaataccggtaggaactgccttctcagcaaaaatggagtacatgaggatgcaattctcgaacatagttgtggtggaatgactgttcgatgtgaattttgcctatcactaaatttctctgatgaaaaaccatccgatgggaaatttactcgatgttgtagcaaagggaaagtctgtccaaatgatatacattttccagattacccggcatatttaaaaagattaatgacaaacgaagattctgacagtaaaaatttcatggaaaatattcgttccataaatagttcttttgcttttgcttccatgggtgcaaatattgcatcgccatcaggatatgggccatactgttttagaatacacggacaagtttatcaccgtactggaactttacatccttcggatggtgtttctcggaagtttgctcaactctatattttggatacagccgaagctacaagtaaaagattagcaatgccagaaaaccagggctgctcagaaagactcatgatcaacatcaacaacctcatgcatgaaataaatgaattaacaaaatcgtacaagatgctacatgaggtagaaaaggaagcccaatctgaagcagcagcaaaaggtattgctcccacagaagtaacaatggcgattaaatacgatcgtaacagtgacccaggtagatataattctccccgtgtaaccgaggttgctgtcatattcagaaacgaagatggagaacctccttttgaaagggacttgctcattcattgtaaaccagatcccaataatccaaatgccactaaaatgaaacaaatcagtatcctgtttcctacattagatgcaatgacatatcctattctttttccacatggtgaaaaaggctggggaacagatattgcattaagactcagagacaacagtgtaatcgacaataatactagacaaaatgtaaggacacgagtcacacaaatgcagtattatggatttcatctctctgtgcgggacacgttcaatcctattttaaatgcaggaaaattaactcaacagtttattgtggattcatattcaaaaatggaggccaatcggataaatttcatcaaagcaaaccaatctaagttgagagttgaaaaatatagtggtttgatggattatctcaaatctagatctgaaaatgacaatgtgccgattggtaaaatgataatacttccatcatcttttgagggtagtcccagaaatatgcagcagcgatatcaggatgctatggcaattgtaacgaagtatggcaagcccgatttattcataaccatgacatgcaaccccaaatgggcagatattacaaacaatttacaacgctggcaaaaagttgaaaacagacctgacttggtagccagagtttttaatattaagctgaatgctcttttaaatgatatatgtaaattccatttatttggcaaagtaatagctaaaattcatgtcattgaatttcagaaacgcggactgcctcacgctcacatattattgatattagatagtgagtccaaattacgttcagaagatgacattgaccgtatagttaaggcagaaattccagatgaagaccagtgtcctcgactttttcaaattgtaaaatcaaatatggtacatggaccatgtggaatacaaaatccaaatagtccatgtatggaaaatggaaaatgttcaaagggatatccaaaagaatttcaaaatgcgaccattggaaatattgatggatatcccaaatacaaacgaagatctggtagcaccatgtctattggaaataaagttgtcgataacacttggattgtcccttataacccgtatttgtgccttaaatataactgtcatataaatgttgaagtctgtgcatcaattaaaagtgtcaaatatttatttaaatacatctataaagggcacgattgtgcaaatattcaaatttctgaaaaaaatattatcaatcatgacgaagtacaggacttcattgactccaggtatgtgagcgctcctgaggctgtttggagactttttgcaatgcgaatgcatgaccaatctcatgcaatcacaagattagctattcatttgccaaatgatcagaatttgtattttcataccgatgattttgctgaagttttagatagggctaaaaggcataactcgactttgatggcttggttcttattgaatagagaagattctgatgcacgtaattattattattgggagattccacagcattatgtgtttaataattctttgtggacaaaacgccgaaagggtgggaataaagtattaggtagactgttcactgtgagctttagagaaccagaacgatattaccttagacttttgcttctgcatgtaaaaggtgcgataagttttgaggatctgcgaactgtaggaggtgtaacttatgatacatttcatgaagctgctaaacaccgaggattattacttgatgacactatctggaaagatacgattgacgatgcaatcatccttaatatgcccaaacaactacggcaactttttgcatatatatgtgtgtttggatgtccttctgctgcagacaaattatgggatgagaataaatctcattttattgaagatttctgttggaaattacaccgaagagaaggtgcctgtgtgaactgtgaaatgcatgcccttaacgaaattcaggaggtattcacattgcatggaatgaaatgttcacatttcaaacttccggactatcctttattaatgaatgcaaatacatgtgatcaattgtacgagcaacaacaggcagaggttttgataaattctctgaatgatgaacagttggcagcctttcagactataacttcagccatcgaagatcaaactgtacaccccaaatgctttttcttggatggtccaggtggtagtggaaaaacatatctgtataaagttttaacacattatattagaggtcgtggtggtactgttttacccacagcatctacaggaattgctgcaaatttacttcttggtggaagaacctttcattcccaatataaattaccaattccattaaatgaaacttcaatttctagactcgatataaagagtgaagttgctaaaaccattaaaaaggcccaacttctcattattgatgaatgcaccatggcatccagtcatgctataaacgccatagatagattactaagagaaattatgaatttgaatgttgcatttggtgggaaagttctccttctcggaggggattttcgacaatgtctcagtattgtaccacatgctatgcgatcggccatagtacaaacgagtttaaagtactgtaatgtttggggatgtttcagaaagttgtctcttaaaacaaatatgagatcagaggattctgcttatagtgaatggttagtaaaacttggagatggcaaacttgatagcagttttcatttaggaatggatattattgaaatcccccatgaaatgatttgtaacggatctattattgaagctacctttggaaatagtatatctatagataatattaaaaatatatctaaacgtgcaattctttgtccaaaaaatgagcatgttcaaaaattaaatgaagaaattttggatatacttgatggagattttcacacatatttgagtgatgattccattgattcaacagatgatgctgaaaaggaaaattttcccatcgaatttcttaatagtattactccttcgggaatgccgtgtcataaattaaaattgaaagtgggtgcaatcatcatgctattgagaaatcttaatagtaaatggggtctttgtaatggtactagatttattatcaaaagattacgacctaacattatcgaagctgaagtattaacaggatctgcagagggagaggttgttctgattccaagaattgatttgtccccatctgacactggcctcccatttaaattaattcgaagacagtttcccgtgatgccagcatttgcgatgactattaataaatcacaaggacaaactctagacagagtaggaatattcctacctgaacccgttttcgcacatggtcagttatatgttgctttctctcgagttcgaagagcatgtgacgttaaagttaaagttgtaaatacttcatcacaagggaaattagtcaagcactctgaaagtgtttttactcttaatgtggtatacagggagatattagaataagtttaatcactttatcagtcattgtttgcatcaatgttgtttttatatcatgtttttgttgtttttatatcatgtctttgttgttgttatatcatgttgttattgtttatttattaataaatttatgtattattttcatatacattttactcatttcctttcatctctcacacttctattatagagaaagggcaaatagcaatattaaaatatttcctctaattaattccctttcaatgtgcacgaatttcgtgcaccgggccactag

SEQ ID NO: 244 - protein, 1496 aa, Artificial Sequence
  Helitron transposase
MSKEQLLIQRSSAAERCRRYRQKMSAEQRASDLERRRRLQQNVSEEQLLEKRRSEAEKQRRHRQKMSKDQRAFEVERRRWRRQNMSREQSSTSTTNTGRNCLLSKNGVHEDAILEHSCGGMTVRCEFCLSLNFSDEKPSDGKFTRCCSKGKVCPNDIHFPDYPAYLKRLMTNEDSDSKNFMENIRSINSSFAFASMGANIASPSGYGPYCFRIHGQVYHRTGTLHPSDGVSRKFAQLYILDTAEATSKRLAMPENQGCSERLMININNLMHEINELTKSYKMLHEVEKEAQSEAAAKGIAPTEVTMAIKYDRNSDPGRYNSPRVTEVAVIFRNEDGEPPFERDLLIHCKPDPNNPNATKMKQISILFPTLDAMTYPILFPHGEKGWGTDIALRLRDNSVIDNNTRQNVRTRVTQMQYYGFHLSVRDTFNPILNAGKLTQQFIVDSYSKMEANRINFIKANQSKLRVEKYSGLMDYLKSRSENDNVPIGKMIILPSSFEGSPRNMQQRYQDAMAIVTKYGKPDLFITMTCNPKWADITNNLQRWQKVENRPDLVARVFNIKLNALLNDICKFHLFGKVIAKIHVIEFQKRGLPHAHILLILDSESKLRSEDDIDRIVKAEIPDEDQCPRLFQIVKSNMVHGPCGIQNPNSPCMENGKCSKGYPKEFQNATIGNIDGYPKYKRRSGSTMSIGNKVVDNTWIVPYNPYLCLKYNCHINVEVCASIKSVKYLFKYIYKGHDCANIQISEKNIINHDEVQDFIDSRYVSAPEAVWRLFAMRMHDQSHAITRLAIHLPNDQNLYFHTDDFAEVLDRAKRHNSTLMAWFLLNREDSDARNYYYWEIPQHYVFNNSLWTKRRKGGNKVLGRLFTVSFREPERYYLRLLLLHVKGAISFEDLRTVGGVTYDTFHEAAKHRGLLLDDTIWKDTIDDAIILNMPKQLRQLFAYICVFGCPSAADKLWDENKSHFIEDFCWKLHRREGACVNCEMHALNEIQEVFTLHGMKCSHFKLPDYPLLMNANTCDQLYEQQQAEVLINSLNDEQLAAFQTITSAIEDQTVHPKCFFLDGPGGSGKTYLYKVLTHYIRGRGGTVLPTASTGIAANLLLGGRTFHSQYKLPIPLNETSISRLDIKSEVAKTIKKAQLLIIDECTMASSHAINAIDRLLREIMNLNVAFGGKVLLLGGDFRQCLSIVPHAMRSAIVQTSLKYCNVWGCFRKLSLKTNMRSEDSAYSEWLVKLGDGKLDSSFHLGMDIIEIPHEMICNGSIIEATFGNSISIDNIKNISKRAILCPKNEHVQKLNEEILDILDGDFHTYLSDDSIDSTDDAEKENFPIEFLNSITPSGMPCHKLKLKVGAIIMLLRNLNSKWGLCNGTRFIIKRLRPNIIEAEVLTGSAEGEVVLIPRIDLSPSDTGLPFKLIRRQFPVMPAFAMTINKSQGQTLDRVGIFLPEPVFAHGQLYVAFSRVRRACDVKVKVVNTSSQGKLVKHSESVFTLNVVYREILE

SEQ ID NO: 245 - DNA, 4682 bp, Artificial Sequence
  Tol2 transposon
cagaggtgtaaagtacttgagtaattttacttgattactgtacttaagtattatttttggggatttttactttacttgagtacaattaaaaatcaatacttttacttttacttaattacatttttttagaaaaaaaagtactttttactccttacaattttatttacagtcaaaaagtacttattttttggagatcacttcattctattttcccttgctattaccaaaccaattgaattgcgctgatgcccagtttaatttaaatgttatttattctgcctatgaaaatcgttttcacattatatgaaattggtcagacatgttcattggtcctttggaagtgacgtcatgtcacatctattaccacaatgcacagcaccttgacctggaaattagggaaattataacagtcaatcagtggaagaaaatggaggaagtatgtgattcatcagcagctgcgagcagcacagtccaaaatcagccacaggatcaagagcacccgtggccgtatcttcgcgaattcttttctttaagtggtgtaaataaagattcattcaagatgaaatgtgtcctctgtctcccgcttaataaagaaatatcggccttcaaaagttcgccatcaaacctaaggaagcatattgaggtaagtacattaagtattttgttttactgatagtttttttttttttttttttttttttttttgggtgtgcatgttttgacgttgatggcgcgccttttatatgtgtagtaggcctattttcactaatgcatgcgattgacaatataaggctcacgtaataaaatgctaaaatgcatttgtaattggtaacgttaggtccacgggaaatttggcgcctattgcagctttgaataatcattatcattccgtgctctcattgtgtttgaattcatgcaaaacacaagaaaaccaagcgagaaatttttttccaaacatgttgtattgtcaaaacggtaacactttacaatgaggttgattagttcatgtattaactaacattaaataaccatgagcaatacatttgttactgtatctgttaatctttgttaacgttagttaatagaaatacagatgttcattgtttgttcatgttagttcacagtgcattaactaatgttaacaagatataaagtattagtaaatgttgaaattaacatgtatacgtgcagttcattattagttcatgttaactaatgtagttaactaacgaaccttattgtaaaagtgttaccatcaaaactaatgtaatgaaatcaattcaccctgtcatgtcagccttacagtcctgtgtttttgtcaatataatcagaaataaaattaatgtttgattgtcactaaatgctactgtatttctaaaatcaacaagtatttaacattataaagtgtgcaattggctgcaaatgtcagttttattaaagggttagttcacccaaaaatgaaaataatgtcattaatgactcgccctcatgtcgttccaagcccgtaagacctccgttcatcttcagaacacagtttaagatattttagatttagtccgagagctttctgtgcctccattgagaatgtatgtacggtatactgtccatgtccagaaaggtaataaaaacatcaaagtagtccatgtgacatcagtgggttagttagaattttttgaagcatcgaatacattttggtccaaaaataacaaaacctacgactttattcggcattgtattctcttccgggtctgttgtcaatccgcgttcacgacttcgcagtgacgctacaatgctgaataaagtcgtaggttttgttatttttggaccaaaatgtattttcgatgcttcaaataattctacctaacccactgatgtcacatggactactttgatgtttttattacctttctggacatggacagtataccgtacatacattttcagtggagggacagaaagctctcggactaaatctaaaatatcttaaactgtgttccgaagatgaacggaggtgttacgggcttggaacgacatgagggtgagtcattaatgacatcttttcatttttgggtgaactaaccctttaatgctgtaatcagagagtgtatgtgtaattgttacatttattgcatacaatataaatatttatttgttgtttttacagagaatgcacccaaattacctcaaaaactactctaaattgacagcacagaagagaaagatcgggacctccacccatgcttccagcagtaagcaactgaaagttgactcagttttcccagtcaaacatgtgtctccagtcactgtgaacaaagctatattaaggtacatcattcaaggacttcatcctttcagcactgttgatctgccatcatttaaagagctgattagtacactgcagcctggcatttctgtcattacaaggcctactttacgctccaagatagctgaagctgctctgatcatgaaacagaaagtgactgctgccatgagtgaagttgaatggattgcaaccacaacggattgttggactgcacgtagaaagtcattcattggtgtaactgctcactggatcaaccctggaagtcttgaaagacattccgctgcacttgcctgcaaaagattaatgggctctcatacttttgaggtactggccagtgccatgaatgatatccactcagagtatgaaatacgtgacaaggttgtttgcacaaccacagacagtggttccaactttatgaaggctttcagagtttttggtgtggaaaacaatgatatcgagactgaggcaagaaggtgtgaaagtgatgacactgattctgaaggctgtggtgagggaagtgatggtgtggaattccaagatgcctcacgagtcctggaccaagacgatggcttcgaattccagctaccaaaacatcaaaagtgtgcctgtcacttacttaacctagtctcaagcgttgatgcccaaaaagctctctcaaatgaacactacaagaaactctacagatctgtctttggcaaatgccaagctttatggaataaaagcagccgatcggctctagcagctgaagctgttgaatcagaaagccggcttcagcttttaaggccaaaccaaacgcggtggaattcaacttttatggctgttgacagaattcttcaaatttgcaaagaagcaggagaaggcgcacttcggaatatatgcacctctcttgaggttccaatgtaagtgtttttcccctctatcgatgtaaacaaatgtgggttgtttttgtttaatactctttgattatgctgatttctcctgtaggtttaatccagcagaaatgctgttcttgacagagtgggccaacacaatgcgtccagttgcaaaagtactcgacatcttgcaagcggaaacgaatacacagctggggtggctgctgcctagtgtccatcagttaagcttgaaacttcagcgactccaccattctctcaggtactgtgacccacttgtggatgccctacaacaaggaatccaaacacgattcaagcatatgtttgaagatcctgagatcatagcagctgccatccttctccctaaatttcggacctcttggacaaatgatgaaaccatcataaaacgaggtaaatgaatgcaagcaacatacacttgacgaattctaatctgggcaacctttgagccataccaaaattattcttttatttatttatttttgcactttttaggaatgttatatcccatctttggctgtgatctcaatatgaatattgatgtaaagtattcttgcagcaggttgtagttatccctcagtgtttcttgaaaccaaactcatatgtatcatatgtggtttggaaatgcagttagattttatgctaaaataagggatttgcatgattttagatgtagatgactgcacgtaaatgtagttaatgacaaaatccataaaatttgttcccagtcagaagcccctcaaccaaacttttctttgtgtctgctcactgtgcttgtaggcatggactacatcagagtgcatctggagcctttggaccacaagaaggaattggccaacagttcatctgatgatgaagattttttcgcttctttgaaaccgacaacacatgaagccagcaaagagttggatggatatctggcctgtgtttcagacaccagggagtctctgctcacgtttcctgctatttgcagcctctctatcaagactaatacacctcttcccgcatcggctgcctgtgagaggcttttcagcactgcaggattgcttttcagccccaaaagagctaggcttgacactaacaattttgagaatcagcttctactgaagttaaatctgaggttttacaactttgagtagcgtgtactggcattagattgtctgtcttatagtttgataattaaatacaaacagttctaaagcaggataaaaccttgtatgcatttcatttaatgttttttgagattaaaagcttaaacaagaatctctagttttctttcttgcttttacttttacttccttaatactcaagtacaattttaatggagtacttttttacttttactcaagtaagattctagccagatacttttacttttaattgagtaaaattttccctaagtacttgtactttcacttgagtaaaatttttgagtactttttacacctctg

SEQ ID NO: 246 - protein, 649 aa, Artificial Sequence
  Tol2 transposase
MEEVCDSSAAASSTVQNQPQDQEHPWPYLREFFSLSGVNKDSFKMKCVLCLPLNKEISAFKSSPSNLRKHIERMHPNYLKNYSKLTAQKRKIGTSTHASSSKQLKVDSVFPVKHVSPVTVNKAILRYIIQGLHPFSTVDLPSFKELISTLQPGISVITRPTLRSKIAEAALIMKQKVTAAMSEVEWIATTTDCWTARRKSFIGVTAHWINPGSLERHSAALACKRLMGSHTFEVLASAMNDIHSEYEIRDKVVCTTTDSGSNFMKAFRVFGVENNDIETEARRCESDDTDSEGCGEGSDGVEFQDASRVLDQDDGFEFQLPKHQKCACHLLNLVSSVDAQKALSNEHYKKLYRSVFGKCQALWNKSSRSALAAEAVESESRLQLLRPNQTRWNSTFMAVDRILQICKEAGEGALRNICTSLEVPMFNPAEMLFLTEWANTMRPVAKVLDILQAETNTQLGWLLPSVHQLSLKLQRLHHSLRYCDPLVDALQQGIQTRFKHMFEDPEIIAAAILLPKFRTSWTNDETIIKRGMDYIRVHLEPLDHKKELANSSSDDEDFFASLKPTTHEASKELDGYLACVSDTRESLLTFPAICSLSIKTNTPLPASAACERLFSTAGLLFSPKRARLDTNNFENQLLLKLNLRFYNFE

SEQ ID NO: 247 - protein, 636 aa, Artificial Sequence
  TcBuster transposase
MMLNWLKSGKLESQSQEQSSCYLENSNCLPPTLDSTDIIGEENKAGTTSRKKRKYDEDYLNFGFTWTGDKDEPNGLCVICEQVVNNSSLNPAKLKRHLDTKHPTLKGKSEYFKRKCNELNQKKHTFERYVRDDNKNLLKASYLVSLRIAKQGEAYTIAEKLIKPCTKDLTTCVFGEKFASKVDLVPLSDTTISRRIEDMSYFCEAVLVNRLENAKCGFTLQMDESTDVAGLAILLVFVRYIHESSFEEDMLFCKALPTQTTGEEIFNLLNAYFEKHSIPWNLCYHICTDGAKAMVGVIKGVIARIKKLVPDIKASHCCLHRHALAVKRIPNALHEVLNDAVKMINFIKSRPLNARVFALLCDDLGSLHKNLLLHTEVRWLSRGKVLTRFWELRDEIRIFFNEREFAGKLNDTSWLQNLAYIADIFSYLNEVNLSLQGPNSTIFKVNSRINSIKSKLKLWEECITKNNTECFANLNDFLETSNTALDPNLKSNILEHLNGLKNTFLEYFPPTCNNISWVENPFNECGNVDTLPIKEREQLIDIRTDTTLKSSFVPDGIGPFWIKLMDEFPEISKRAVKELMPFVTTYLCEKSFSVYVATKTKYRNRLDAEDDMRLQLTTIHPDIDNLCNNKQAQKSH

SEQ ID NO: 248 - DNA, 1911 bp, Artificial Sequence
  TcBuster transposase
atgatgttgaattggctgaaaagtggaaagcttgaaagtcaatcacaggaacagagttcctgctaccttgagaactctaactgcctgccaccaacgctcgattctacagatattatcggtgaagagaacaaagctggtaccacctctcgcaagaagcggaaatatgacgaggactatctgaacttcggttttacatggactggcgacaaggatgagcccaacggactttgtgtgatttgcgagcaggtagtcaacaattcctcacttaacccggccaaactgaaacgccatttggacacaaagcatccgacgcttaaaggcaagagcgaatacttcaaaagaaaatgtaacgagctcaatcaaaagaagcatacttttgagcgatacgtaagggacgataacaagaacctcctgaaagcttcttatctcgtcagtttgagaatagctaaacagggcgaggcatataccatagcggagaagttgatcaagccttgcaccaaggatctgacaacttgcgtatttggagaaaaattcgcgagcaaagttgatctcgtccccctgtccgacacgactatttcaaggcgaatcgaagacatgagttacttctgtgaagccgtgctggtgaacaggttgaaaaatgctaaatgtgggtttacgctgcagatggacgagtcaacagatgttgccggtcttgcaatcctgcttgtgtttgttaggtacatacatgaaagctcttttgaggaggatatgttgttctgcaaagcacttcccactcagacgacaggggaggagattttcaatcttctcaatgcctatttcgaaaagcactccatcccatggaatctgtgttaccacatttgcacagacggtgccaaggcaatggtaggagttattaaaggagtcatagcgagaataaaaaaactcgtccctgatataaaagctagccactgttgcctgcatcgccacgctttggctgtaaagcgaataccgaatgcattgcacgaggtgctcaatgacgctgttaaaatgatcaacttcatcaagtctcggccgttgaatgcgcgcgtcttcgctttgctgtgtgacgatttggggagcctgcataaaaatcttcttcttcataccgaagtgaggtggctgtctagaggaaaggtgctgacccgattttgggaactgagagatgaaattagaattttcttcaacgaaagggaatttgccgggaaattgaacgacaccagttggttgcaaaatttggcatatatagctgacatattcagttatctgaatgaagttaatctttccctgcaagggccgaatagcacaatcttcaaggtaaatagccgcattaacagtattaaatcaaagttgaagttgtgggaagagtgtataacgaaaaataacactgagtgttttgcgaacctcaacgattttttggaaacttcaaacactgcgttggatccaaacctgaagtctaatattttggaacatctcaacggtcttaagaacacctttctggagtattttccacctacgtgtaataatatctcctgggtggagaatcctttcaatgaatgcggtaacgtcgatacactcccaataaaagagagggaacaattgattgacatacggactgatacgacattgaaatcttcattcgtgcctgatggtataggaccattctggatcaaactgatggacgaatttccagaaattagcaaacgagctgtcaaagagctcatgccatttgtaaccacttacctctgtgagaaatcattttccgtctatgtagccacaaaaacaaaatatcgaaatagacttgatgctgaagacgatatgcgactccaacttactactatccatccagacattgacaacctttgtaacaacaagcaggctcagaaatcccactga

SEQ ID NO: 249 - protein, 107 aa, Artificial Sequence
  FKBP12
GVQVETISPGDGRTFPKRGQTCVVHYTGMLEDGKKVDSSRDRNKPFKFMLGKQEVIRGWEEGVAQMSVGQRAKLTISPDYAYGATGHPGIIPPHATLVFDVELLKLE

SEQ ID NO: 250 - DNA, 321 bp, Artificial Sequence
  FKBP12
ggggtccaggtcgagactatttcaccaggggatgggcgaacatttccaaaaaggggccagacttgcgtcgtgcattacaccgggatgctggaggacgggaagaaagtggacagctccagggatcgcaacaagcccttcaagttcatgctgggaaagcaggaagtgatccgaggatgggaggaaggcgtggcacagatgtcagtcggccagcgggccaaactgaccattagccctgactacgcttatggagcaacaggccacccagggatcattccccctcatgccaccctggtcttcgatgtggaactgctgaagctggag

SEQ ID NO: 251 - protein, 5 aa, Artificial Sequence
  linker
GGGGS

SEQ ID NO: 252 - DNA, 15 bp, Artificial Sequence
  linker
ggaggaggaggatcc

SEQ ID NO: 253 - protein, 282 aa, Artificial Sequence
  truncatedCas9
GFGDVGALESLRGNADLAYILSMEPCGHCLIINNVNFCRESGLRTRTGSNIDCEKLRRRFSSLHFMVEVKGDLTAKKMVLALLELAQQDHGALDCCVVVILSHGCQASHLQFPGAVYGTDGCPVSVEKIVNIFNGTSCPSLGGKPKLFFIQACGGEQKDHGFEVASTSPEDESPGSNPEPDATPFQEGLRTFDQLDAISSLPTPSDIFVSYSTFPGFVSWRDPKSGSWYVETLDDIFEQWAHSEDLQSLLLRVANAVSVKGIYKQMPGCFNFLRKKLFFKTS

SEQ ID NO: 254 - DNA, 843 bp, Artificial Sequence
  truncatedCas9
tttggggacgtgggggccctggagtctctgcgaggaaatgccgatctggcttacatcctgagcatggaaccctgcggccactgtctgatcattaacaatgtgaacttctgcagagaaagcggactgcgaacacggactggctccaatattgactgtgagaagctgcggagaaggttctctagtctgcactttatggtcgaagtgaaaggggatctgaccgccaagaaaatggtgctggccctgctggagctggctcagcaggaccatggagctctggattgctgcgtggtcgtgatcctgtcccacgggtgccaggcttctcatctgcagttccccggagcagtgtacggaacagacggctgtcctgtcagcgtggagaagatcgtcaacatcttcaacggcacttcttgccctagtctggggggaaagccaaaactgttctttatccaggcctgtggcggggaacagaaagatcacggcttcgaggtggccagcaccagccctgaggacgaatcaccagggagcaaccctgaaccagatgcaactccattccaggagggactgaggacctttgaccagctggatgctatctcaagcctgcccactcctagtgacattttcgtgtcttacagtaccttcccaggctttgtctcatggcgcgatcccaagtcagggagctggtacgtggagacactggacgacatctttgaacagtgggcccattcagaggacctgcagagcctgctgctgcgagtggcaaacgctgtctctgtgaagggcatctacaaacagatgcccgggtgcttcaattttctgagaaagaaactgttctttaagacttcc

SEQ ID NO: 255 - protein, 394 aa, Artificial Sequence; identical to SEQ ID NO: 62
  inducible polypeptide

SEQ ID NO: 256 - DNA, 1182 bp, Artificial Sequence
  inducible
ggggtccaggtcgagactatttcaccaggggatgggcgaacatttccaaaaaggggccagacttgcgtcgtgcattacaccgggatgctggaggacgggaagaaagtggacagctccagggatcgcaacaagcccttcaagttcatgctgggaaagcaggaagtgatccgaggatgggaggaaggcgtggcacagatgtcagtcggccagcgggccaaactgaccattagccctgactacgcttatggagcaacaggccacccagggatcattccccctcatgccaccctggtcttcgatgtggaactgctgaagctggagggaggaggaggatccggatttggggacgtgggggccctggagtctctgcgaggaaatgccgatctggcttacatcctgagcatggaaccctgcggccactgtctgatcattaacaatgtgaacttctgcagagaaagcggactgcgaacacggactggctccaatattgactgtgagaagctgcggagaaggttctctagtctgcactttatggtcgaagtgaaaggggatctgaccgccaagaaaatggtgctggccctgctggagctggctcagcaggaccatggagctctggattgctgcgtggtcgtgatcctgtcccacgggtgccaggcttctcatctgcagttccccggagcagtgtacggaacagacggctgtcctgtcagcgtggagaagatcgtcaacatcttcaacggcacttcttgccctagtctggggggaaagccaaaactgttctttatccaggcctgtggcggggaacagaaagatcacggcttcgaggtggccagcaccagccctgaggacgaatcaccagggagcaaccctgaaccagatgcaactccattccaggagggactgaggacctttgaccagctggatgctatctcaagcctgcccactcctagtgacattttcgtgtcttacagtaccttcccaggctttgtctcatggcgcgatcccaagtcagggagctggtacgtggagacactggacgacatctttgaacagtgggcccattcagaggacctgcagagcctgctgctgcgagtggcaaacgctgtctctgtgaagggcatctacaaacagatgcccgggtgcttcaattttctgagaaagaaactgttctttaagacttcc

SEQ ID NO: 257 - protein, 395 aa, Artificial Sequence
  ic9
MGVQVETISPGDGRTFPKRGQTCVVHYTGMLEDGKKVDSSRDRNKPFKFMLGKQEVIRGWEEGVAQMSVGQRAKLTISPDYAYGATGHPGIIPPHATLVFDVELLKLEGGGGSGFGDVGALESLRGNADLAYILSMEPCGHCLIINNVNFCRESGLRTRTGSNIDCEKLRRRFSSLHFMVEVKGDLTAKKMVLALLELAQQDHGALDCCVVVILSHGCQASHLQFPGAVYGTDGCPVSVEKIVNIFNGTSCPSLGGKPKLFFIQACGGEQKDHGFEVASTSPEDESPGSNPEPDATPFQEGLRTFDQLDAISSLPTPSDIFVSYSTFPGFVSWRDPKSGSWYVETLDDIFEQWAHSEDLQSLLLRVANAVSVKGIYKQMPGCFNFLRKKLFFKTS

SEQ ID NO: 258 - DNA, 1185 bp, Artificial Sequence
  ic9
atgggcgtgcaggtcgagacaatttctcctggcgacggccggacattccctaagcgaggacagacatgcgtggtgcactacaccggcatgctggaagatggcaagaaggtggacagcagccgggacagaaacaagcccttcaagttcatgctgggcaagcaagaagtgatcagaggctgggaagagggcgtcgcccagatgtctgttggacagagagccaagctgacaatcagccccgattacgcctatggcgccacaggacaccctggcatcattcctccacatgccacactggtgttcgacgtggaactgctgaagctggaaggcggcggaggatctggctttggagatgtgggagccctggaaagcctgagaggcaatgccgatctggcctacatcctgagcatggaaccttgcggccactgcctgattatcaacaacgtgaacttctgcagagagagcggcctgagaaccagaaccggcagcaacatcgactgcgagaagctgcggagaagattcagcagcctgcacttcatggtggaagtgaagggcgacctgaccgccaagaaaatggtgctggctctgctggaactggcccagcaagatcatggcgccctggattgctgtgtggtcgtgatcctgtctcacggctgtcaggccagccatctgcaattccctggcgccgtgtatggcaccgatggctgtcctgtgtccgtggaaaagatcgtgaacatcttcaacggcaccagctgtcctagcctcggcggaaagcccaagctgttcttcatccaagcctgtggcggcgagcagaaggatcacggatttgaggtggccagcacaagccccgaggatgagtctcctggaagcaaccctgagcctgacgccacacctttccaagagggactgagaaccttcgaccagctggacgctatcagctccctgcctacacctagcgacatcttcgtgtcctacagcacattccccggctttgtgtcttggcgggaccctaagtctggctcttggtatgtggaaaccctggacgatatcttcgagcagtgggcccatagcgaggacctgcaatctctgctgctgagagtggccaatgccgtgtccgtgaagggcatctacaagcagatgcctggctgcttcaacttcctgcggaagaagctgtttttcaagaccagc
